(19) United States
(12) Patent Application Publication
(10) Pub. No.: US 2003/0044783 A1
(43) Pub. Date: Mar. 6, 2003

(54) Human genes and gene expression products

(76) Inventors: Lewis T. Williams, Mill Valley, CA (US); Jaime Escobedo, Alamo, CA (US); Michael A. Innis, (US); Pablo Dominguez Garcia, San Francisco, CA (US); Julie Sudduth-Klinger, Kensington, CA (US); Christoph Reinhard, Alameda, CA (US); Filippo Randazzo, Oakland, CA (US); Giulia C. Kennedy, San Francisco, CA (US); David Pot, Arlington, VA (US); Altaf Kassam, Oakland, CA (US); George Lamson, Moraga, CA (US); Radjoe Drmanac, Palo Alto, CA (US); Mark Dickson, Hollister, CA (US); Ivan Labat, Mountain View, CA (US); Lee William Jones, Sunnyvale, CA (US); Birgit Stache-Crain, Sunnyvale, CA (US)

Correspondence Address: Chiron Corporation Intellectual Property -R440, PO Box 8097, Emeryville, CA, 94662-8097, US

(21) Appl. No.: 09/803,719

(22) Filed: Mar. 9, 2001

Related U.S. Application Data
(60) Provisional application No. 60/188,609, filed on Mar. 9, 2000.

(51) Int. Cl. C12Q 1/68; C07H 21/04; C12N 9/00; C12P 21/02; C12N 5/06; C07K 14/435; C07K 16/40

(52) U.S. Cl. 435/6; 435/69.1; 435/183; 435/320.1; 435/325; 530/350; 536/23.2; 530/388.1

(57) ABSTRACT

This invention relates to novel human polynucleotides and variants thereof, their encoded polypeptides and variants thereof, to genes corresponding to these polynucleotides and to proteins expressed by the genes. The invention also relates to diagnostic and therapeutic agents employing such novel human polynucleotides, their corresponding genes or gene products, e.g., these genes and proteins, including probes, antisense constructs, and antibodies.

### CROSS-REFERENCE TO RELATED APPLICATIONS

[0001] This application claims the benefit of U.S. provisional application serial No. 60/188,609, filed Mar. 9, 2000, which application is incorporated herein by reference in its entirety.

### FIELD OF THE INVENTION

[0002] The present invention relates to polynucleotides of human origin and the encoded gene products.

### BACKGROUND OF THE INVENTION

[0003] Identification of novel polynucleotides, particularly those that encode an expressed gene product, is important in the advancement of drug discovery, diagnostic technologies, and the understanding of the progression and nature of complex diseases such as cancer. Identification of genes expressed in different cell types isolated from sources that differ in disease state or stage, developmental stage, exposure to various environmental factors, the tissue of origin, the species from which the tissue was isolated, and the like is key to identifying the genetic factors that are responsible for the phenotypes associated with these various differences.

[0004] This invention provides novel human polynucleotides, the polypeptides encoded by these polynucleotides, and the genes and proteins corresponding to these novel polynucleotides.

### SUMMARY OF THE INVENTION

[0005] This invention relates to novel human polynucleotides and variants thereof, their encoded polypeptides and variants thereof, to genes corresponding to these polynucleotides and to proteins expressed by the genes. The invention also relates to diagnostics and therapeutics comprising such novel human polynucleotides, their corresponding genes or gene products, including probes, antisense nucleotides, and antibodies. The polynucleotides of the invention correspond to a polynucleotide comprising the sequence information of at least one of SEQ ID NOS:1-2396.

[0006] Various aspects and embodiments of the invention will be readily apparent to the ordinarily skilled artisan upon reading the description provided herein.

### DETAILED DESCRIPTION OF THE INVENTION

[0007] The invention relates to polynucleotides comprising the disclosed nucleotide sequences, to full length cDNA, mRNA genomic sequences, and genes corresponding to these sequences and degenerate variants thereof, and to polypeptides encoded by the polynucleotides of the invention and polypeptide variants. The following detailed description describes the polynucleotide compositions encompassed by the invention, methods for obtaining cDNA or genomic DNA encoding a full-length gene product, expression of these polynucleotides and genes, identification of structural motifs of the polynucleotides and genes, identification of the function of a gene product encoded by a gene corresponding to a polynucleotide of the invention, use of the provided polynucleotides as probes and in mapping and in tissue profiling, use of the corresponding polypeptides and other gene products to raise antibodies, and use of the polynucleotides and their encoded gene products for therapeutic and diagnostic purposes.

[0008] Polynucleotide Compositions

[0009] The scope of the invention with respect to polynucleotide compositions includes, but is not necessarily limited to, polynucleotides having a sequence set forth in any one of SEQ ID NOS: -2396; polynucleotides obtained from the biological materials described herein or other biological sources (particularly human sources) by hybridization under stringent conditions (particularly conditions of high stringency); genes corresponding to the provided polynucleotides; variants of the provided polynucleotides and their corresponding genes, particularly those variants that retain a biological activity of the encoded gene product (e.g., a biological activity ascribed to a gene product corresponding to the provided polynucleotides as a result of the assignment of the gene product to a protein family(ies) and/or identification of a functional domain present in the gene product). Other nucleic acid compositions contemplated by and within the scope of the present invention will be readily apparent to one of ordinary skill in the art when provided with the disclosure here. “Polynucleotide” and “nucleic acid” as used herein with reference to nucleic acids of the composition is not intended to be limiting as to the length or structure of the nucleic acid unless specifically indicted.

[0010] The invention features polynucleotides that are expressed in human tissue, specifically human colon, breast, and/or lung tissue. Novel nucleic acid compositions of the invention of particular interest comprise a sequence set forth in any one of SEQ ID NOS:1-2396 or an identifying -sequence thereof. An “identifying sequence” is a contiguous sequence of residues at least about 10 nt to about 20 nt in length, usually at least about 50 nt to about 100 nt in length, that uniquely identifies a polynucleotide sequence, e.g., exhibits less than 90%, usually less than about 80% to about 85% sequence identity to any contiguous nucleotide sequence of more than about 20 nt. Thus, the subject novel nucleic acid compositions include full length cDNAs or mRNAs that encompass an identifying sequence of contiguous nucleotides from any one of SEQ ID NOS:1-2396.

[0011] The polynucleotides of the invention also include polynucleotides having sequence similarity or sequence identity. Nucleic acids having sequence similarity are detected by hybridization under low stringency conditions, for example, at 50° C. and 10× SSC (0.9 M saline/0.09 M sodium citrate) and remain bound when subjected to washing at 55° C. in 1× SSC. Sequence identity can be determined by hybridization under stringent conditions, for example, at 50° C. or higher and 0.1× SSC (9 mM saline/0.9 mM sodium citrate). Hybridization methods and conditions are well known in the art, see, e.g., U.S. Pat. No. 5,707,829. Nucleic acids that are substantially identical to the provided polynucleotide sequences, e.g. allelic variants, genetically altered versions of the gene, etc., bind to the provided polynucleotide sequences (SEQ ID NOS:1-2396) under stringent hybridization conditions. By using probes, particularly labeled probes of DNA sequences, one can isolate homologous or related genes. The source of homologous genes can be any species, e.g. primate species, particularly human; rodents, such as rats and mice; canines, felines, bovines, ovines, equines, yeast, nematodes, etc.

[0012] Preferably, hybridization is performed using at least 15 contiguous nucleotides (nt) of at least one of SEQ ID NOS:1-2396. That is, when at least 15 contiguous nt of one of the disclosed SEQ ID NOS. is used as a probe, the probe will preferentially hybridize with a nucleic acid comprising the complementary sequence, allowing the identification and retrieval of the nucleic acids that uniquely hybridize to the selected probe. Probes from more than one SEQ ID NO. can hybridize with the same nucleic acid if the cDNA from which they were derived corresponds to one mRNA. Probes of more than 15 nt can be used, e.g., probes of from about 18 nt to about 100 nt, but -15 nt represents sufficient sequence for unique identification.

[0013] The polynucleotides of the invention also include naturally occurring variants of the nucleotide sequences (e.g., degenerate variants, allelic variants, etc.). Variants of the polynucleotides of the invention are identified by hybridization of putative variants with nucleotide sequences disclosed herein, preferably by hybridization under stringent conditions. For example, by using appropriate wash conditions, variants of the polynucleotides of the invention can be identified where the allelic variant exhibits at most about 25-30% base pair (bp) mismatches relative to the selected polynucleotide probe. In general, allelic variants contain 15-25% bp mismatches, and can contain as little as even 5-15%, or 2-5%, or 1-2% bp mismatches, as well as a single bp mismatch.

[0014] The invention also encompasses homologs corresponding to the polynucleotides of SEQ ID NOS:1-2396, where the source of homologous genes can be any mammalian species, e.g. primate species, particularly human; rodents, such as rats; canines, felines, bovines, ovines, equines, yeast, nematodes, etc. Between mammalian species, e.g., human and mouse, homologs generally have substantial sequence similarity, e.g., at least 75% sequence identity, usually at least 90%, more usually at least 95% between nucleotide sequences. Sequence similarity is calculated based on a reference sequence, which may be a subset of a larger sequence, such as a conserved motif, coding region, flanking region, etc. A reference sequence will usually be at least about 18 contiguous nt long, more usually at least about 30 nt long, and may extend to the complete sequence that is being compared. Algorithms for sequence analysis are known in the art, such as gapped BLAST, described in Altschul, et al. Nucleic Acids Res. (1997) 25:3389-3402.

[0015] In general, variants of the invention have a sequence identity greater than at least about 65%, preferably at least about 75%, more preferably at least about 85%, and can be greater than at least about 90% or more as determined by the Smith-Waterman homology search algorithm as implemented in MPSRCH program (Oxford Molecular). For the purposes of this invention, a preferred method of calculating percent identity is the Smith-Waterman algorithm, using the following. Global DNA sequence identity must be greater than 65% as determined by the Smith-Waterman homology search algorithm as implemented in MPSRCH program (Oxford Molecular) using an affine gap search with the following search parameters: gap open penalty, 12; and gap extension penalty, 1.

[0016] The subject nucleic acids can be cDNAs or genomic DNAs, as well as fragments thereof, particularly fragments that encode a biologically active gene product and/or are useful in the methods disclosed herein (e.g., in diagnosis, as a unique identifier of a differentially expressed gene of interest, etc.). The term “cDNA” as used herein is intended to include all nucleic acids that share the arrangement of sequence elements found in native mature mRNA species, where sequence elements are exons and 3′ and 5′ non-coding regions. Normally mRNA species have contiguous exons, with the intervening introns, when present, being removed by nuclear RNA splicing, to create a continuous open reading frame encoding a polypeptide of the invention.

[0017] A genomic sequence of interest comprises the nucleic acid present between the initiation codon and the stop codon, as defined in the listed sequences, including all of the introns that are normally present in a native chromosome. It can further include the 3′ and 5′ untranslated regions found in the mature mRNA. It can further include specific transcriptional and translational regulatory sequences, such as promoters, enhancers, etc., including about 1 kb, but possibly more, of flanking genomic DNA at either the 5′ and 3′ end of the transcribed region. The genomic DNA can be isolated as a fragment of 100 kbp or smaller; and substantially free of flanking chromosomal sequence. The genomic DNA flanking the coding region, either 3′ and 5′, or internal regulatory sequences as sometimes found in introns, contains sequences required for proper tissue, stage-specific, or disease-state specific expression.

[0018] The nucleic acid compositions of the subject invention can encode all or a part of the subject polypeptides. Double or single stranded fragments can be obtained from the DNA sequence by chemically synthesizing oligonucleotides in accordance with conventional methods, by restriction enzyme digestion, by PCR amplification, etc. Isolated polynucleotides and polynucleotide fragments of the invention comprise at least about 10, about 15, about 20, about 35, about 50, about 100, about 150 to about 200, about 250 to about 300, or about 350 contiguous nt selected from the polynucleotide sequences as shown in SEQ ID NOS:1-2396. For the most part, fragments will be of at least 15 nt, usually at least 18 nt or 25 nt, and up to at least about 50 contiguous nt in length or more. In a preferred embodiment, the polynucleotide molecules comprise a contiguous sequence of at least 12 nt selected from the group consisting of the polynucleotides shown in SEQ ID NOS:1-2396.

[0019] Probes specific to the polynucleotides of the invention can be generated using the polynucleotide sequences disclosed in SEQ ID NOS:1-2396. The probes are preferably at least about a 12, 15, 16, 18, 20, 22, 24, or 25 nt fragment of a corresponding contiguous sequence of SEQ ID NOS:1-2396, and can be less than 2, 1, 0.5, 0.1, or 0.05 kb in length. The probes can be synthesized chemically or can be generated from longer polynucleotides using restriction enzymes. The probes can be labeled, for example, with a radioactive, biotinylated, or fluorescent tag. Preferably, probes are designed based upon an identifyng sequence of a polynucleotide of one of SEQ ID NOS:1-2396. More preferably, probes are designed based on a contiguous sequence of one of the subject polynucleotides that remain unmasked following application of a masking program for masking low complexity (e.g., XBLAST) to the sequence., ie., one would select an unmasked region, as indicated by the polynucleotides outside the poly-n stretches of the masked sequence produced by the masking program.

[0020] The polynucleotides of the subject invention are isolated and obtained in substantial purity, generally as other than an intact chromosome. Usually, the polynucleotides, either as DNA or RNA, will be obtained substantially free of other naturally-occurring nucleic acid sequences, generally being at least about 50%, usually at least about 90% pure and are typically “recombinant”, e.g., flanked by one or more nucleotides with which it is not normally associated on a naturally occurring chromosome.

[0021] The polynucleotides of the invention can be provided as a linear molecule or within a circular molecule, and can be provided within autonomously replicating molecules (vectors) or -within molecules without replication sequences. Expression of the polynucleotides can be regulated by their own or by other regulatory sequences known in the art. The polynucleotides of the invention can be introduced into suitable host cells using a variety of techniques available in the art, such as transferrin polycation-mediated DNA transfer, transfection with naked or encapsulated nucleic acids, liposome-mediated DNA transfer, intracellular transportation of DNA-coated latex beads, protoplast fusion, viral infection, electroporation, gene gun, calcium phosphate-mediated transfection, and the like.

[0022] The subject nucleic acid compositions can be used to, for example, produce polypeptides, as probes for the detection of mRNA of the invention in biological samples (e.g., extracts of human cells) to generate additional copies of the polynucleotides, to generate ribozymes or antisense oligonucleotides, and as single stranded DNA probes or as triple-strand forming oligonucleotides. The probes described herein can be used to, for example, determine the presence or absence of the polynucleotide sequences as shown in SEQ ID NOS:1-2396 or variants thereof in a sample. These and other uses are described in more detail below.

[0023] Use of Polynucleotides to Obtain Full-Length cDNA, Gene, and Promoter Region

[0024] Full-length cDNA molecules comprising the disclosed polynucleotides are obtained as follows. A polynucleotide having a sequence of one of SEQ ID NOS:1-2396, or a portion thereof comprising at least 12, 15, 18, or 20 nt, is used as a hybridization probe to detect hybridizing members of a cDNA library using probe design methods, cloning methods, and clone selection techniques such as those described in U.S. Pat. No. 5,654,173. Libraries of cDNA are made from selected tissues, such as normal or tumor tissue, or from tissues of a mammal treated with, for example, a pharmaceutical agent. Preferably, the tissue is the same as the tissue from which the polynucleotides of the invention were isolated, as both the polynucleotides described herein and the cDNA represent expressed genes. Most preferably, the cDNA library is made from the biological material described herein in the Examples. The choice of cell type for library construction can be made after the identity of the protein encoded by the gene corresponding to the polynucleotide of the invention is known. This will indicate which tissue and cell types are likely to express the related gene, and thus represent a suitable source for the mRNA for generating the cDNA. Where the provided polynucleotides are isolated from cDNA libraries, the libraries are prepared from mRNA of human colon cells, more preferably, human colon cancer cells, even more preferably, from a highly metastatic colon cell, Km12L4.

[0025] Techniques for producing and probing nucleic acid sequence libraries are described, for example, in Sambrook et al., Molecular Cloning: A Laboratory Manual, 2nd Ed., (1989) Cold Spring Harbor Press, Cold Spring Harbor, N.Y. The cDNA can be prepared by using primers based on sequence from SEQ ID NOS:1-2396. hi one embodiment, the cDNA library can be made from only poly-adenylated mRNA. Thus, poly-T primers can be used to prepare cDNA from the mRNA.

[0026] Members of the library that are larger than the provided polynucleotides, and preferably that encompass the complete coding sequence of the native message, are obtained. In order to confirm that the entire cDNA has been obtained, RNA protection experiments are performed as follows. Hybridization of a full-length cDNA to an mRNA will protect the RNA from RNase degradation. If the cDNA is not full length, then the portions of the mRNA that are not hybridized will be subject to RNase degradation. This is assayed, as is known in the art, by changes in electrophoretic mobility on polyacrylamide gels, or by detection of released monoribonucleotides. Sambrook et al., Molecular Cloning: A Laboratory Manual, 2nd Ed., (1989) Cold Spring Harbor Press, Cold Spring Harbor, N.Y. In order to obtain additional sequences 5'to the end of a partial cDNA, 5′ RACE (PCR Protocols: A Guide to Methods and Applications, (1990) Academic Press, Inc.) can be performed.

[0027] Genomic DNA is isolated using the provided polynucleotides in a manner similar to the isolation of full-length cDNAs. Briefly, the provided polynucleotides, or portions thereof, are used as probes to libraries of genomic DNA. Preferably, the library is obtained from the cell type that was used to generate the polynucleotides of the invention, but this is not essential. Most preferably, the genomic DNA is obtained from the biological material described herein in the Examples. Such libraries can be in vectors suitable for carrying large segments of a genome, such as P1 or YAC, as described in detail in Sambrook et al., 9.4-9.30. Lin addition, genomic sequences can be isolated from human BAC libraries, which are commercially available from Research Genetics, Inc., Huntsville, Ala., USA, for example. hi order to obtain additional 5′ or 3′ sequences, chromosome walking is performed, as described in Sambrook et al., such that adjacent and overlapping fragments of genomic DNA are isolated. These are mapped and pieced together, as is known in the art, using restriction digestion enzymes and DNA ligase.

[0028] Using the polynucleotide sequences of the invention, corresponding full-length genes can be isolated using both classical and PCR methods to construct and probe cDNA libraries. Using either method, Northern blots, preferably, are performed on a number of cell types to determine which cell lines express the gene of interest at the highest level. Classical methods of constructing cDNA libraries are taught in Sambrook et al., supra. With these methods, cDNA can be produced from -mRNA and inserted into viral or expression vectors. Typically, libraries of mRNA comprising poly(A) tails can be produced with poly(T) primers. Similarly, cDNA libraries can be produced using the instant sequences as primers.

[0029] PCR methods are used to amplify the members of a cDNA library that comprise the desired insert. In this case, the desired insert will contain sequence from the full length cDNA that corresponds to the instant polynucleotides. Such PCR methods include gene trapping and RACE methods. Gene trapping entails inserting a member of a cDNA library into a vector. The vector then is denatured to produce single stranded molecules. Next, a substrate-bound probe, such a biotinylated oligo, is used to trap cDNA inserts of interest. Biotinylated probes can be linked to an avidin-bound solid substrate. PCR methods can be used to amplify the trapped cDNA. To trap sequences corresponding to the full length genes, the labeled probe sequence is based on the polynucleotide sequences of the invention. Random primers or primers specific to the library vector can be used to amplify the trapped cDNA. Such gene trapping techniques are described in Gruber et al., WO 95/04745 and Gruber et al., U.S. Pat. No. 5,500,356. Kits are commercially available to perform gene trapping experiments from, for example, Life Technologies, Gaithersburg, Md., USA.

[0030] “Rapid amplification of cDNA ends,” or RACE, is a PCR method of amplifying cDNAs from a number of different RNAs. The cDNAs are ligated to an oligonucleotide linker, and amplified by PCR using two primers. One primer is based on sequence from the instant polynucleotides, for which full length sequence is desired, and a second primer comprises sequence that hybridizes to the oligonucleotide linker to amplify the cDNA. A description of this methods is reported in WO 97/19110. In preferred embodiments of RACE, a common primer is designed to anneal to an arbitrary adaptor sequence ligated to cDNA ends (Apte and Siebert, Biotechniques (1993) 15:890-893; Edwards et al., Nuc. Acids Res. (1991) 19:5227-5232). When a single gene-specific RACE primer is paired with the common primer, preferential amplification of sequences between the single gene specific primer and the common primer occurs. Commercial cDNA pools modified for use in RACE are available.

[0031] Another PCR-based method generates full-length cDNA library with anchored ends without needing specific knowledge of the cDNA sequence. The method uses lock-docking primers (I-VI), where one primer, poly TV (I-III) locks over the polyA tail of eukaryotic mRNA producing first strand synthesis and a second primer, polyGH (IV-VI) locks onto the polyC tail added by terminal deoxynucleotidyl transferase (TdT)(see, e.g., WO 96/40998).

[0032] The promoter region of a gene generally is located 5′ to the initiation site for RNA polymerase II. Hundreds of promoter regions contain the “TATA” box, a sequence such as TATTA or TATAA, which is sensitive to mutations. The promoter region can be obtained by performing 5′RACE using a primer from the coding region of the gene. Alternatively, the cDNA can be used as a probe for the genomic sequence, and the region 5′ to the coding region is identified by “walking up.” If the gene is highly expressed or differentially expressed, the promoter from the gene can be of use in a regulatory construct for a heterologous gene.

[0033] Once the full-length cDNA or gene is obtained, DNA encoding variants can be prepared by site-directed mutagenesis, described in detail in Sambrook et al., 15.3-15.63. The choice of codon or nucleotide to be replaced can be based on disclosure herein on optional changes in amino acids to achieve altered protein structure and/or function.

[0034] As an alternative method to obtaining DNA or RNA from a biological material, nucleic acid comprising nucleotides having the sequence of one or more polynucleotides of the invention can be synthesized. Thus, the invention encompasses nucleic acid molecules ranging in length from 15 nt (corresponding to at least 15 contiguous nt of one of SEQ ID NOS:1-2396) up to a maximum length suitable for one or more biological manipulations, including replication and expression, of the nucleic acid molecule. The invention includes but is not limited to (a) nucleic acid having the size of a full gene, and comprising at least one of SEQ ID NOS:1-2396; (b) the nucleic acid of (a) also comprising at least one additional gene, operably linked to permit expression of a fusion protein; (c) an expression vector comprising (a) or (b); (d) a plasmid comprising (a) or (b); and (e) a recombinant viral particle comprising (a) or (b). Once provided with the polynucleotides disclosed herein, construction or preparation of (a)- (e) are well within the skill in the art.

[0035] The sequence of a nucleic acid comprising at least 15 contiguous nt of at least any one of SEQ ID NOS:1-2396, preferably the entire sequence of at least any one of SEQ ID NOS:1-2396, is not limited and can be any sequence of A, T, G, and/or C (for DNA) and A, U, G, and/or C (for RNA) or modified bases thereof, including inosine and pseudouridine. The choice of sequence will depend on the desired function and can be dictated by coding regions desired, the intron-like regions desired, and the regulatory regions desired. Where the entire sequence of any one of SEQ ID NOS:1-2396 is within the nucleic acid, the nucleic acid obtained is referred to herein as a polynucleotide comprising the sequence of any one of SEQ ID NOS:1-2396.

[0036] Expression of Polypeptide Encoded by Full-Length cDNA or Full-Length Gene

[0037] The provided polynucleotides (e.g., a polynucleotide having a sequence of one of SEQ ID NOS:1-2396), the corresponding cDNA, or the full-length gene is used to express a partial or complete gene product. Constructs of polynucleotides having sequences of SEQ ID NOS:1-2396 can also be generated synthetically. Alternatively, single-step assembly of a gene and entire plasmid from large numbers of oligodeoxyribonucleotides is described by, e.g. Stemmer et al., Gene (Amsterdam) (1995) 164(1):49-53. In this method, assembly PCR (the synthesis of long DNA sequences from large numbers of oligodeoxyribonucleotides (oligos)) is described. The method is derived from DNA shuffling (Stemmer, Nature (1994) 370:389-391), and does not rely on DNA ligase, but instead relies on DNA polymerase to build increasingly longer DNA fragments during the assembly process.

[0038] Appropriate polynucleotide constructs are purified using standard recombinant DNA techniques as described in, for example, Sambrook et al., Molecular Cloning: A Laboratory Manual, 2nd Ed., (1989) Cold Spring Harbor Press, Cold Spring Harbor, N.Y, and under current regulations described in United States Dept. of HHS, National Institute of Health (NIH) Guidelines for Recombinant DNA Research. The gene product encoded by a polynucleotide of the invention is expressed in any expression system, including, for example, bacterial, yeast, insect, amphibian and mammalian systems. Vectors, host cells and methods for obtaining expression in same are well known in the art. Suitable vectors and host cells are described in U.S. Pat. No. 5,654,173.

[0039] Polynucleotide molecules comprising a polynucleotide sequence provided herein are generally propagated by placing the molecule in a vector. Viral and non-viral vectors are used, including plasmids. The choice of plasmid will depend on the type of cell in which propagation is desired and the purpose of propagation. Certain vectors are useful for amplifying and making large amounts of the desired DNA sequence. Other vectors are suitable for expression in cells in culture. Still other vectors are suitable for transfer and expression in cells in a whole animal or person. The choice of appropriate vector is well within the skill of the art. Many such vectors are available commercially. Methods for preparation of vectors comprising a desired sequence are well known in the art.

[0040] The polynucleotides set forth in SEQ ID NOS:1-2396 or their corresponding full-length polynucleotides are linked to regulatory sequences as appropriate to obtain the desired expression properties. These can include promoters (attached either at the 5′ end of the sense strand or at the 3′ end of the antisense strand), enhancers, terminators, operators, repressors, and inducers. The promoters can be regulated or constitutive. In some situations it may be desirable to use conditionally active promoters, such as tissue-specific or developmental stage-specific promoters. These are linked to the desired nucleotide sequence using the techniques described above for linkage to vectors. Any techniques known in the art can be used.

[0041] When any of the above host cells, or other appropriate host cells or organisms, are used to replicate and/or express the polynucleotides or nucleic acids of the invention, the resulting replicated nucleic acid, RNA, expressed protein or polypeptide, is within the scope of the invention as a product of the host cell or organism. The product is recovered by any appropriate means known in the art.

[0042] Once the gene corresponding to a selected polynucleotide is identified, its expression can be regulated in the cell to which the gene is native. For example, an endogenous gene of a cell can be regulated by an exogenous regulatory sequence as disclosed in U.S. Pat. No. 5,641,670.

[0043] Identification of Functional and Structural Motifs of Novel Genes Screening Against Publicly Available Databases

[0044] Translations of the nucleotide sequence of the provided polynucleotides, cDNAs or full genes can be aligned with individual known sequences. Similarity with individual sequences can be used to determine the activity of the polypeptides encoded by the polynucleotides of the invention. Also, sequences exhibiting similarity with more than one individual sequence can exhibit activities that are characteristic of either or both individual sequences.

[0045] The full length sequences and fragments of the polynucleotide sequences of the nearest neighbors can be used as probes and primers to identify and isolate the full length sequence corresponding to provided polynucleotides. The nearest neighbors can indicate a tissue or cell type to be used to construct a library for the full-length sequences corresponding to the provided polynucleotides.

[0046] Typically, a selected polynucleotide is translated in all six frames to determine the best alignment with the individual sequences. The sequences disclosed herein in the Sequence Listing are in a 5′ to 3′ orientation and translation in three frames can be sufficient (with a few specific exceptions as described in the Examples). These amino acid sequences are referred to, generally, as query sequences, which will be aligned with the individual sequences. Databases with individual sequences are described in “Computer Methods for Macromolecular Sequence Analysis” Methods in Enzymology (1996) 266, Doolittle, Academic Press, Inc., a division of Harcourt Brace & Co., San Diego, Calif., USA. Databases include GenBank, EMBL, and DNA Database of Japan (DDBJ).

[0047] Query and individual sequences can be aligned using the methods and computer programs described above, and include BLAST 2.0 ((National Center for Biotechnology Information, Bethesda, Md.). See also Altschul, et al. Nucleic Acids Res. (1997) 25:3389-3402. Another alignment algorithm is Fasta, available in the Genetics Computing Group (GCG) package, Madison, Wisconsin, USA, a wholly owned subsidiary of Oxford Molecular Group, Inc. Other techniques for alignment are described in Doolittle, supra. Preferably, an alignment program that permits gaps in the sequence is utilized to align the sequences. The Smith-Waterman is one type of algorithm that permits gaps in sequence alignments. See Meth. Mol. Biol. (1997) 70: 173-187. Also, the GAP program using the Needleman and Wunsch alignment method can be utilized to align sequences. An alternative search strategy uses MPSRCH software, which runs on a MASPAR computer. MPSRCH uses a Smith-Waterman algorithm to score sequences on a massively parallel computer. This approach improves ability to identify sequences that are distantly related matches, and is especially tolerant of small gaps and nucleotide sequence errors. Amino acid sequences encoded by the provided polynucleotides can be used to search both protein and DNA databases. Incorporated 2(1- herein by reference are all sequences that have been made public as of the filing date of this application by any of the DNA or protein sequence databases, including the patent databases (e.g., GeneSeq). Also incorporated by reference are those sequences that have been submitted to these databases as of the filing date of the present application but not made public until after the filing date of the present application.

[0048] Results of individual and query sequence alignments can be divided into three categories: high similarity, weak similarity, and no similarity. Individual alignment results ranging from high similarity to weak similarity provide a basis for determining polypeptide activity and/or structure. Parameters for categorizing individual results include: percentage of the alignment region length where the strongest alignment is found, percent sequence identity, and p value. The percentage of the alignment region length is calculated by counting the number of residues of the individual sequence found in the region of strongest alignment, e.g., contiguous region of the individual sequence that contains the greatest number of residues that are identical to the residues of the corresponding region of the aligned query sequence. This number is divided by the total residue length of the query sequence to calculate a percentage. For example, a query sequence of 20 amino acid residues might be aligned with a 20 amino acid region of an individual sequence. The individual sequence might be identical to amino acid residues 5, 9-15, and 17-19 of the query sequence. The region of strongest alignment is thus the region stretching from residue 9-19, an 11 amino acid stretch. The percentage of the alignment region length is: 11 (length of the region of strongest alignment) divided by (query sequence length) 20 or 55%.

[0049] Percent sequence identity is calculated by counting the number of amino acid matches between the query and individual sequence and dividing total number of matches by the number of residues of the individual sequences found in the region of strongest alignment. Thus, the percent identity in the example above would be 10 matches divided by 11 amino acids, or approximately, 90.9%

[0050] P value is the probability that the alignment was produced by chance. For a single alignment, the p value can be calculated according to Karlin et al., Proc. Natl. Acad. Sci. (1990) 87:2264 and Karlin et al., Proc. Natl. Acad. Sci. (1993) 90. The p value of multiple alignments using the same query sequence can be calculated using an heuristic approach described in Altschul et al., Nat. Genet. (1994) 6:119. Alignment programs such as BLAST program can calculate the p value. See also Altschul et al., Nucleic Acids Res. (1997) 25:3389-3402.

[0051] Another factor to consider for determining identity or similarity is the location of the similarity or identity. Strong local alignment can indicate similarity even if the length of alignment is short. Sequence identity scattered throughout the length of the query sequence also can indicate a similarity between the query and profile sequences. The boundaries of the region where the sequences align can be determined according to Doolittle, supra; BLAST 2.0 (see, e.g., Altschul, et al. Nucleic Acids Res. (1997) 25:3389-3402) or FAST programs; or by determining the area where sequence identity is highest.

[0052] High Similarity.

[0053] In general, in alignment results considered to be of high similarity, the percent of the alignment region length is typically at least about 55% of total length query sequence; more typically, at least about 58%; even more typically; at least about 60% of the total residue length of the query sequence. Usually, percent length of the alignment region can be as much as about 62%; more usually, as much as about 64%; even more usually, as much as about 66%. Further, for high similarity, the region of alignment, typically, exhibits at least about 75% of sequence identity; more typically, at least about 78%; even more typically; at least about 80% sequence identity. Usually, percent sequence identity can be as much as about 82%; more usually, as much as about 84%; even more usually, as much as about 86%.

[0054] The p value is used in conjunction with these methods. If high similarity is found, the query sequence is considered to have high similarity with a profile sequence when the p value is less than or equal to about 10⁻²; more usually; less than or equal to about 10⁻³; even more usually; less than or equal to about 10⁻⁴. More typically, the p value is no more than about 10⁻⁵; more typically; no more than or equal to about 10⁻¹⁰; even more typically; no more than or equal to about 10⁻¹⁵ for the query sequence to be considered high similarity.

[0055] Weak Similarity.

[0056] In general, where alignment results considered to be of weak similarity, there is no minimum percent length of the alignment region nor minimum length of alignment. A better showing of weak similarity is considered when the region of alignment is, typically, at least about 15 amino acid residues in length; more typically, at least about 20; even more typically; at least about 25 amino acid residues in length. Usually, length of the alignment region can be as much as about 30 amino acid residues; more usually, as much as about 40; even more usually, as much as about 60 amino acid residues. Further, for weak similarity, the region of alignment, typically, exhibits at least about 35% of sequence identity; more typically, at least about 40%; even more typically; at least about 45% sequence identity. Usually, percent sequence identity can be as much as about 50%; more usually, as much as about 55%; even more usually, as much as about 60%.

[0057] If low similarity is found, the query sequence is considered to have weak similarity with a profile sequence when the p value is usually less than or equal to about 10⁻²; more usually; less than or equal to about 10⁻³; even more usually; less than or equal to about 10⁻⁴. More typically, the p value is no more than about 10⁻⁵; more usually; no more than or equal to about 10⁻¹⁰; even more usually; no more than or equal to about 10⁻¹⁵ for the query sequence to be considered weak similarity.

[0058] Similarity Determined by Sequence Identity Alone.

[0059] Sequence identity alone can be used to determine similarity of a query sequence to an individual sequence and can indicate the activity of the sequence. Such an alignment, preferably, permits gaps to align sequences. Typically, the query sequence is related to the profile sequence if the sequence identity over the entire query sequence is at least about 15%; more typically, at least about 20%; even more typically, at least about 25%; even more typically, at least about 50%. Sequence identity alone as a measure of similarity is most useful when the query sequence is usually, at least 80 residues in length; more usually, 90 residues; even more usually, at least 95 amino acid residues in length. More typically, similarity can be concluded based on sequence identity alone when the query sequence is preferably 100 residues in length; more preferably, 120 residues in length; even more preferably, 150 amino acid residues in length.

[0060] Alignments with Profile and Multiple Aligned Sequences.

[0061] Translations of the provided polynucleotides can be aligned with amino acid profiles that define either protein families or common motifs. Also, translations of the provided polynucleotides can be aligned to multiple sequence alignments (MSA) comprising the polypeptide sequences of members of protein families or motifs. Similarity or identity with profile sequences or MSAs can be used to determine the activity of the gene products (e.g., polypeptides) encoded by the provided polynucleotides or corresponding cDNA or genes. For example, sequences that show an identity or similarity with a chemokine profile or MSA can exhibit chemokine activities.

[0062] Profiles can designed manually by (1) creating an MSA, which is an alignment of the amino acid sequence of members that belong to the family and (2) constructing a statistical representation of the alignment. Such methods are described, for example, in Bimey et al., Nucl. Acid Res. (1996) 24(14): 2730-2739. MSAs of some protein families and motifs are publicly available. For example, the Pfam database available from Washington University (St. Louis, Mo.) includes MSAs of 547 different families and motifs. These MSAs are described also in Sonnhammer et al., Proteins (1997) 28: 405-420. Other publicaly available sources include those over the world wide web provided by the European Molecular Biology Laboratory (Heidelberg, Germany). A brief description of these MSAs is reported in Pascarella et al., Prot. Eng. (1996) 9(3):249-251. Techniques for building profiles from MSAs are described in Sonnhammer et al., supra; Birney et al., supra; and “Computer Methods for Macromolecular Sequence Analysis,” Methods in Enzymology (1996) 266, Doolittle, Academic Press, Inc., San Diego, Calf., USA.

[0063] Similarity between a query sequence and a protein family or motif can be determined by (a) comparing the query sequence against the profile and/or (b) aligning the query sequence with the members of the family or motif. Typically, a program such as Searchwise is used to compare the query sequence to the statistical representation of the multiple alignment, also known as a profile (see Bimey et al., supra). Other techniques to compare the sequence and profile are described in Sonnhammer et al., supra and Doolittle, supra.

[0064] Next, methods described by Feng et al., J. Mol. Evol. (1987) 25:351 and Higgins et al., CABIOS (1989) 5:151 can be used align the query sequence with the members of a family or motif, also known as a MSA. Sequence alignments can be generated using any of a variety of software tools. Examples include PileUp, which creates a multiple sequence alignment, and is described in Feng et al., J. Mol. Evol. (1987) 25:351. Another method, GAP, uses the alignment method of Needleman et al., J. Mol. Biol. (1970) 48:443. GAP is best suited for global alignment of sequences. A third method, BestFit, functions by inserting gaps to maximize the number of matches using the local homology algorithm of Smith et al., Adv. Appl. Math. (1981) 2:482. In general, the following factors are used to determine if a similarity between a query sequence and a profile or MSA exists: (1) number of conserved residues found in the query sequence, (2) percentage of conserved residues found in the query sequence, (3) number of frameshifts, and (4) spacing between conserved residues.

[0065] Some alignment programs that both translate and align sequences can make any number of frameshifts when translating the nucleotide sequence to produce the best alignment. The fewer frameshifts needed to produce an alignment, the stronger the similarity or identity between the query and profile or MSAs. For example, a weak similarity resulting from no frameshifts can be a better indication of activity or structure of a query sequence, than a strong similarity resulting from two frameshifts. Preferably, three or fewer frameshifts are found in an alignment; more preferably two or fewer frameshifts; even more preferably, one or fewer frameshifts; even more preferably, no frameshifts are found in an alignment of query and profile or MSAs.

[0066] Conserved residues are those amino acids found at a particular position in all or some of the family or motif members. Alternatively, a position is considered conserved if only a certain class of amino acids is found in a particular position in all or some of the family members. For example, the N-terminal position can contain a positively charged amino acid, such as lysine, arginine, or histidine.

[0067] Typically, a residue of a polypeptide is conserved when a class of amino acids or a single amino acid is found at a particular position in at least about 40% of all class members; more typically, at least about 50%; even more typically, at least about 60% of the members. Usually, a residue is conserved when a class or single amino acid is found in at least about 70% of the members of a family or motif, more usually, at least about 80%; even more usually, at least about 90%; even more usually, at least about 95%.

[0068] A residue is considered conserved when three unrelated amino acids are found at a particular position in the some or all of the members; more usually, two unrelated amino acids. These residues are conserved when the unrelated amino acids are found at particular positions in at least about 40% of all class member; more typically, at least about 50%; even more typically, at least about 60% of the members. Usually, a residue is conserved when a class or single amino acid is found in at least about 70% of the members of a family or motif, more usually, at least about 80%; even more usually, at least about 90%; even more usually, at least about 95%.

[0069] A query sequence has similarity to a profile or MSA when the query sequence comprises at least about 25% of the conserved residues of the profile or MSA; more usually, at least about 30%; even more usually; at least about 40%. Typically, the query sequence has a stronger similarity to a profile sequence or MSA when the query sequence comprises at least about 45% of the conserved residues of the profile or MSA; more typically, at least about 50%; even more typically; at least about 55%.

[0070] Identification of Secreted & Membrane-Bound Polypeptides

[0071] Both secreted and membrane-bound polypeptides of the present invention are of particular interest. For example, levels of secreted polypeptides can be assayed in body fluids that are convenient, such as blood, plasma, serum, and other body fluids such as urine, prostatic fluid and semen. Membrane-bound polypeptides are useful for constructing vaccine antigens or inducing an immune response. Such antigens would comprise all or part of the extracellular region of the membrane-bound polypeptides. Because both secreted and membrane-bound polypeptides comprise a fragment of contiguous hydrophobic amino acids, hydrophobicity predicting algorithms can be used to identify such polypeptides.

[0072] A signal sequence is usually encoded by both secreted and membrane-bound polypeptide genes to direct a polypeptide to the surface of the cell. The signal sequence usually comprises a stretch of hydrophobic residues. Such signal sequences can fold into helical structures. Membrane-bound polypeptides typically comprise at least one transmembrane region that possesses a stretch of hydrophobic amino acids that can transverse the membrane. Some transmembrane regions also exhibit a helical structure. Hydrophobic fragments within a polypeptide can be identified by using computer algorithms. Such algorithms include Hopp & Woods. Proc. Natl. Acad. Sci. USA (1981) 78:3824-3828; Kyte & Doolittle, J. Mol. Biol. (1982) 157: 105-132; and RAOAR algorithm, Degli Esposti et al., Eur. J. Biochem. (1990) 190: 207-219.

[0073] Another method of identifying secreted and membrane-bound polypeptides is to translate the polynucleotides of the invention in all six frames and determine if at least 8 contiguous hydrophobic amino acids are present. Those translated polypeptides with at least 8; more typically, 10; even more typically, 12 contiguous hydrophobic amino acids are considered to be either a putative secreted or membrane bound polypeptide. Hydrophobic amino acids include alanine, glycine, histidine, isoleucine, leucine, lysine, methionine, phenylalanine, proline, threonine, tryptophan, tyrosine, and valine.

[0074] Identification of the Function of an Expression Product of a Full-Length Gene

[0075] Ribozymes, antisense constructs, and dominant negative mutants can be used to determine function of the expression product of a gene corresponding to a polynucleotide provided herein. These methods and compositions are particularly useful where the provided novel polynucleotide exhibits no significant or substantial homology to a sequence encoding a gene of known function. Antisense molecules and ribozymes can be constructed from synthetic polynucleotides. Typically, the phosphoramidite method of oligonucleotide synthesis is used. See Beaucage et al., Tet. Lett. (1981) 22:1859 and U.S. Pat. No. 4,668,777. Automated devices for synthesis are available to create oligonucleotides using this chemistry. Examples of such devices include Biosearch 8600, Models 392 and 394 by Applied Biosystems, a division of Perkin-Elmer Corp., Foster City, Calif., USA; and Expedite by Perceptive Biosystems, Framingham, Mass., USA. Synthetic RNA, phosphate analog oligonucleotides, and chemically derivatized oligonucleotides can also be produced, and can be covalently attached to other molecules. RNA oligonucleotides can be synthesized, for example, using RNA phosphoramidites. This method can be performed on an automated synthesizer, such as Applied Biosystems, Models 392 and 394, Foster City, Calif., USA.

[0076] Phosphorothioate oligonucleotides can also be synthesized for antisense construction. A sulfurizing reagent, such as tetraethylthiruam disulfide (TETD) in acetonitrile can be used to convert the internucleotide cyanoethyl phosphite to the phosphorothioate triester within 15 minutes at room temperature. TETD replaces the iodine reagent, while all other reagents used for standard phosphoramidite chemistry remain the same. Such a synthesis method can be automated using Models 392 and 394 by Applied Biosystems, for example.

[0077] Oligonucleotides of up to 200 nt can be synthesized, more typically, 100 nt, more typically 50 nt; even more typically 30 to 40 nt. These synthetic fragments can be annealed and ligated together to construct larger fragments. See, for example, Sambrook et al., supra. Trans-cleaving catalytic RNAs (ribozymes) are RNA molecules possessing endoribonuclease activity. Ribozymes are specifically designed for a particular target, and the target message must contain a specific nucleotide sequence. They are engineered to cleave any RNA species site-specifically in the background of cellular RNA. The cleavage event renders the mRNA unstable and prevents protein expression. Importantly, ribozymes can be used to inhibit expression of a gene of unknown function for the purpose of determining its function in an in vitro or in vivo context, by detecting the phenotypic effect. One commonly used ribozyme motif is the hammerhead, for which the substrate sequence requirements are minimal. Design of the hammerhead ribozyme, as well as therapeutic uses of ribozymes, are disclosed in Usman et al., Current Opin. Struct. Biol. (1996) 6:527. Methods for production of ribozymes, including hairpin structure ribozyme fragments, methods of increasing ribozyme specificity, and the like are known in the art.

[0078] The hybridizing region of the ribozyme can be modified or can be prepared as a branched structure as described in Horn and Urdea, Nucleic Acids Res. (1989) 17:6959. The basic structure of the ribozymes can also be chemically altered in ways familiar to those skilled in the art, and chemically synthesized ribozymes can be administered as synthetic oligonucleotide derivatives modified by monomeric units. In a therapeutic context, liposome mediated delivery of ribozymes improves cellular uptake, as described in Birikh et al., Eur. J. Biochem. (1997) 245:1.

[0079] Antisense nucleic acids are designed to specifically bind to RNA, resulting in the formation of RNA-DNA or RNA-RNA hybrids, with an arrest of DNA replication, reverse transcription or messenger RNA translation. Antisense polynucleotides based on a selected polynucleotide sequence can interfere with expression of the corresponding gene. Antisense polynucleotides are typically generated within the cell by expression from antisense constructs that contain the antisense strand as the transcribed strand. Antisense polynucleotides based on the disclosed polynucleotides will bind and/or interfere with the translation of mRNA comprising a sequence complementary to the antisense polynucleotide. The expression products of control cells and cells treated with the antisense construct are compared to detect the protein product of the gene corresponding to the polynucleotide upon which the antisense construct is based. The protein is isolated and identified using routine biochemical methods.

[0080] Given the extensive background literature and clinical experience in antisense therapy, one skilled in the art can use selected polynucleotides of the invention as additional potential therapeutics. The choice of polynucleotide can be narrowed by first testing them for binding to “hot spot” regions of the genome of cancerous cells. If a polynucleotide is identified as binding to a “hot spot”, testing the polynucleotide as an antisense compound in the corresponding cancer cells is warranted.

[0081] As an alternative method for identifying function of the gene corresponding to a polynucleotide disclosed herein, dominant negative mutations are readily generated for corresponding proteins that are active as homomultimers. A mutant polypeptide will interact with wild-type polypeptides (made from the other allele) and form a non-functional multimer. Thus, a mutation is in a substrate-binding domain, a catalytic domain, or a cellular localization domain. Preferably, the mutant polypeptide will be overproduced. Point mutations are made that have such an effect. In addition, fusion of different polypeptides of various lengths to the terminus of a protein can yield dominant negative mutants. General strategies are available for making dominant negative mutants (see, e.g., Herskowitz, Nature (1987) 329:219). Such techniques can be used to create loss of function mutations, which are useful for determining protein function.

[0082] Polypeptides and Variants Thereof

[0083] The polypeptides of the invention include those encoded by the disclosed polynucleotides, as well as nucleic acids that, by virtue of the degeneracy of the genetic code, are not identical in sequence to the disclosed polynucleotides. Thus, the invention includes within its scope a polypeptide encoded by a polynucleotide having the sequence of any one of SEQ ID NOS:1-2396 or a variant thereof.

[0084] In general, the term “polypeptide” as used herein refers to both the full length polypeptide encoded by the recited polynucleotide, the polypeptide encoded by the gene represented by the recited polynucleotide, as well as portions or fragments thereof. “Polypeptides” also includes variants of the naturally occurring proteins, where such variants are homologous or substantially similar to the naturally occurring protein, and can be of an origin of the same or different species as the naturally occurring protein (e.g., human, murine, or some other species that naturally expresses the recited polypeptide, usually a mammalian species). In general, variant polypeptides have a sequence that has at least about 80%, usually at least about 90%, and more usually at least about 98% sequence identity with a differentially expressed polypeptide of the invention, as measured by BLAST 2.0 using the parameters described above. The variant polypeptides can be naturally or non-naturally glycosylated, i.e., the polypeptide has a glycosylation pattern that differs from the glycosylation pattern found in the corresponding naturally occurring protein.

[0085] The invention also encompasses homologs of the disclosed polypeptides (or fragments thereof) where the homologs are isolated from other species, i.e. other animal or plant species, where such homologs, usually mammalian species, e.g. rodents, such as mice, rats; domestic animals, e.g., horse, cow, dog, cat; and humans. By “homolog” is meant a polypeptide having at least about 35%, usually at least about 40% and more usually at least about 60% amino acid sequence identity to a particular differentially expressed protein as identified above, where sequence identity is determined using the BLAST 2.0 algorithm, with the parameters described supra.

[0086] In general, the polypeptides of the subject invention are provided in a non-naturally occurring environment, e.g. are separated from their naturally occurring environment. In certain embodiments, the subject protein is present in a composition that is enriched for the protein as compared to a control. As such, purified polypeptide is provided, where by purified is meant that the protein is present in a composition that is substantially free of non-differentially expressed polypeptides, where by substantially free is meant that less than 90%, usually less than 60% and more usually less than 50% of the composition is made up of non-differentially expressed polypeptides.

[0087] Also within the scope of the invention are variants; variants of polypeptides include mutants, fragments, and fusions. Mutants can include amino acid substitutions, additions or deletions. The amino acid substitutions can be conservative amino acid substitutions or substitutions to eliminate non-essential amino acids, such as to alter a glycosylation site, a phosphorylation site or an acetylation site, or to minimize misfolding by substitution or deletion of one or more cysteine residues that are not necessary for function. Conservative amino acid substitutions are those that preserve the general charge, hydrophobicity/hydrophilicity, and/or steric bulk of the amino acid substituted. Variants can be designed so as to retain or have enhanced biological activity of a particular region of the protein (e.g., a functional domain and/or, where the polypeptide is a member of a protein family, a region associated with a consensus sequence). Selection of amino acid alterations for production of variants can be based upon the accessibility (interior vs. exterior) of the amino acid (see, e.g., Go et al, Int. J. Peptide Protein Res. (1980) 15:21 1), the thermostability of the variant polypeptide (see, e.g., Querol et al., Prot. Eng. (1996) 9:265), desired glycosylation sites (see, e.g., Olsen and Thomsen, J. Gen. Microbiol. (1991) 137:579), desired disulfide bridges (see, e.g., Clarke et al., Biochemistry (1993) 32:4322; and Wakarchuk et al., Protein Eng. (1994) 7:1379), desired metal binding sites (see, e.g., Toma et al., Biochemistry (1991) 30:97, and Haezerbrouck et al., Protein Eng. (1993) 6:643), and desired substitutions with in proline loops (see, e.g., Masul et al., Appl. Env. Microbiol. (1994) 60:3579). Cysteine-depleted muteins can be produced as disclosed in U.S. Pat. No. 4,959,314.

[0088] Variants also include fragments of the polypeptides disclosed herein, particularly biologically active fragments and/or fragments corresponding to functional domains. Fragments of interest will typically be at least about 10 aa to at least about 15 aa in length, usually at least about 50 aa in length, and can be as long as 300 aa in length or longer, but will usually not exceed about 1000 aa in length, where the fragment will have a stretch of amino acids that is identical to a polypeptide encoded by a polynucleotide having a sequence of any SEQ ID NOS:1-2396, or a homolog thereof. The protein variants described herein are encoded by polynucleotides that are within the scope of the invention. The genetic code can be used to select the appropriate codons to construct the corresponding variants.

[0089] Computer-Related Embodiments

[0090] In general, a library of polynucleotides is a collection of sequence information, which information is provided in either biochemical form (e.g., as a collection of polynucleotide molecules), or in electronic form (e.g., as a collection of polynucleotide sequences stored in a computer-readable form, as in a computer system and/or as part of a computer program). The sequence information of the polynucleotides can be used in a variety of ways, e.g., as a resource for gene discovery, as a representation of sequences expressed in a selected cell type (e.g., cell type markers), and/or as markers of a given disease or disease state. In general, a disease marker is a representation of a gene product that is present in all cells affected by disease either at an increased or decreased level relative to a normal cell (e.g., a cell of the same or similar type that is not substantially affected by disease). For example, a polynucleotide sequence in a library can be a polynucleotide that represents an mRNA, polypeptide, or other gene product encoded by the polynucleotide, that is either overexpressed or underexpressed in a breast ductal cell affected by cancer relative to a normal (ie., substantially disease-free) breast cell.

[0091] The nucleotide sequence information of the library can be embodied in any suitable form, e.g., electronic or biochemical forms. For example, a library of sequence information embodied in electronic form comprises an accessible computer data file (or, in biochemical form, a collection of nucleic acid molecules) that contains the representative nucleotide sequences of genes that are differentially expressed (e.g., overexpressed or underexpressed) as between, for example, i) a cancerous cell and a normal cell; ii) a cancerous cell and a dysplastic cell; iii) a cancerous cell and a cell affected by a disease or condition other than cancer; iv) a metastatic cancerous cell and a normal cell and/or non-metastatic cancerous cell; v) a malignant cancerous cell and a non-malignant cancerous cell (or a normal cell) and/or vi) a dysplastic cell relative to a normal cell. Other combinations and comparisons of cells affected by various diseases or stages of disease will be readily apparent to the ordinarily skilled artisan. Biochemical embodiments of the library include a collection of nucleic acids that have the sequences of the genes in the library, where the nucleic acids can correspond to the entire gene in the library or to a fragment thereof, as described in greater detail below.

[0092] The polynucleotide libraries of the subject invention generally comprise sequence information of a plurality of polynucleotide sequences, where at least one of the polynucleotides has a sequence of any of SEQ ID NOS:1-2396. By plurality is meant at least 2, usually at least 3 and can include up to all of SEQ ID NOS:1-2396. The length and number of polynucleotides in the library will vary with the nature of the library, e.g., if the library is an oligonucleotide array, a cDNA array, a computer database of the sequence information, etc.

[0093] Where the library is an electronic library, the nucleic acid sequence information can be present in a variety of media. “Media” refers to a manufacture, other than an isolated nucleic acid molecule, that contains the sequence information of the present invention. Such a manufacture provides the genome sequence or a subset thereof in a form that can be examined by means not directly applicable to the sequence as it exists in a nucleic acid. For example, the nucleotide sequence of the present invention, e.g. the nucleic acid sequences of any of the polynucleotides of SEQ ID NOS:1-2396, can be recorded on computer readable media, e.g. any medium that can be read and accessed directly by a computer. Such media include, but are not limited to: magnetic storage media, such as a floppy disc, a hard disc storage medium, and a magnetic tape; optical storage media such as CD-ROM; electrical storage media such as RAM and ROM; and hybrids of these categories such as magnetic/optical storage media. One of skill in the art can readily appreciate how any of the presently known computer readable mediums can be used to create a manufacture comprising a recording of the present sequence information. “Recorded” refers to a process for storing information on computer readable medium, using any such methods as known in the art. Any convenient data storage structure can be chosen, based on the means used to access the stored information. A variety of data processor programs and formats can be used for storage, e.g. word processing text file, database format, etc. In addition to the sequence information, electronic versions of the libraries of the invention can be provided in conjunction or connection with other computer-readable information and/or other types of computer-readable files (e.g., searchable files, executable files, etc, including, but not limited to, for example, search program software, etc.).

[0094] By providing the nucleotide sequence in computer readable form, the information can be accessed for a variety of purposes. Computer software to access sequence information is publicly available. For example, the gapped BLAST (Altschul et al. Nucleic Acids Res. (1997) 25:33 89-3402) and BLAZE (Brutlag et al. Comp. Chem. (1993) 17:203) search algorithms on a Sybase system can be used to identify open reading frames (ORFs) within the genome that contain homology to ORFs from other organisms.

[0095] As used herein, “a computer-based system” refers to the hardware means, software means, and data storage means used to analyze the nucleotide sequence information of the present invention. The minimum hardware of the computer-based systems of the present invention comprises a central processing unit (CPU), input means, output means, and data storage means. A skilled artisan can readily appreciate that any one of the currently available computer-based system are suitable for use in the present invention. The data storage means can comprise any manufacture comprising a recording of the present sequence information as described above, or a memory access means that can access such a manufacture.

[0096] “Search means” refers to one or more programs implemented on the computer-based system, to compare a target sequence or target structural motif, or expression levels of a polynucleotide in a sample, with the stored sequence information. Search means can be used to identify fragments or regions of the genome that match a particular target sequence or target motif. A variety of known algorithms are publicly known and commercially available, e.g. MacPattern (EMBL), BLASTN and BLASTX (NCBI). A “target sequence” can be any polynucleotide or amino acid sequence of six or more contiguous nucleotides or two or more amino acids, preferably from about 10 to 100 amino acids or from about 30 to 300 nt A variety of comparing means can be used to accomplish comparison of sequence information from a sample (e.g., to analyze target sequences, target motifs, or relative expression levels) with the data storage means. A skilled artisan can readily recognize that any one of the publicly available homology search programs can be used as the search means for the computer based systems of the present invention to accomplish comparison of target sequences -and motifs. Computer programs to analyze expression levels in a sample and in controls are also known in the art.

[0097] A “target structural motif,” or “target motif,” refers to any rationally selected sequence or combination of sequences in which the sequence(s) are chosen based on a three-dimensional configuration that is formed upon the folding of the target motif, or on consensus sequences of regulatory or active sites. There are a variety of target motifs known in the art. Protein target motifs include, but arc not limited to, enzyme active sites and signal sequences. Nucleic acid target motifs include, but are not limited to, hairpin structures, promoter sequences and other expression elements such as binding sites for transcription factors.

[0098] A variety of structural formats for the input and output means can be used to input and output the information in the computer-based systems of the present invention. One format for an output means ranks the relative expression levels of different polynucleotides. Such presentation provides a skilled artisan with a ranking of relative expression levels to determine a gene expression profile.

[0099] As discussed above, the “library” of the invention also encompasses biochemical libraries of the polynucleotides of SEQ ID NOS:1-2396, e.g., collections of nucleic acids representing the provided polynucleotides. The biochemical libraries can take a variety of forms, e.g., a solution of cDNAs, a pattern of probe nucleic acids stably associated with a surface of a solid support (i.e., an array) and the like. Of particular interest are nucleic acid arrays in which one or more of SEQ ID NOS:1-2396 is represented on the array. By array is meant a an article of manufacture that has at least a substrate with at least two distinct nucleic acid targets on one of its surfaces, where the number of distinct nucleic acids can be considerably higher, typically being at least 10 nt, usually at least 20 nt and often at least 25 nt. A variety of different array formats have been developed and are known to those of skill in the art. The arrays of the subject invention find use in a variety of applications, including gene expression analysis, drug screening, mutation analysis and the like, as disclosed in the above-listed exemplary patent documents.

[0100] In addition to the above nucleic acid libraries, analogous libraries of polypeptides are also provided, where the where the polypeptides of the library will represent at least a portion of the polypeptides encoded by SEQ ID NOS:1-2396.

[0101] Utilities

[0102] Use of Polynucleotide Probes in Mapping, and in Tissue Profiling

[0103] Polynucleotide probes, generally comprising at least 12 contiguous nt of a polynucleotide as shown in the Sequence Listing, are used for a variety of purposes, such as chromosome mapping of the polynucleotide and detection of transcription levels. Additional disclosure about preferred regions of the disclosed polynucleotide sequences is found in the Examples. A probe that hybridizes specifically to a polynucleotide disclosed herein should provide a detection signal at least 5-, 10-, or 20-fold higher than the background hybridization provided with other unrelated sequences.

[0104] Detection of Expression Levels.

[0105] Nucleotide probes are used to detect expression of a gene corresponding to the provided polynucleotide. In Northern blots, mRNA is separated electrophoretically and contacted with a probe. A probe is detected as hybridizing to an mRNA species of a particular size. The amount of hybridization is quantitated to determine relative amounts of expression, for example under a particular condition. Probes are used for in situ hybridization to cells to detect expression. Probes can also be used in vivo for diagnostic detection of hybridizing sequences. Probes are typically labeled with a radioactive isotope. Other types of detectable labels can be used such as chromophores, fluors, and enzymes. Other examples of nucleotide hybridization assays are described in WO92/02526 and U.S. Pat. No. 5,124,246.

[0106] Alternatively, the Polymerase Chain Reaction (PCR) is another means for detecting small amounts of target nucleic acids (see, e.g., Mullis et al., Meth. Enzymol. (1987) 155:335; U.S. Pat. Nos. 4,683,195; and 4,683,202). Two primer polynucleotides nucleotides that hybridize with the target nucleic acids are used to prime the reaction. The primers can be composed of sequence within or 3′ and 5′ to the polynucleotides of the Sequence Listing. Alternatively, if the primers are 3′ and 5′ to these polynucleotides, they need not hybridize to them or the complements. After amplification of the target with a thermostable polymerase, the amplified target nucleic acids can be detected by methods known in the art, e.g., Southern blot. mRNA or cDNA can also be detected by traditional blotting techniques (e.g., Southern blot, Northern blot, etc.) described in Sambrook et al., “Molecular Cloning: A Laboratory Manual” (New York, Cold Spring Harbor Laboratory, 1989) (e.g., without PCR amplification). In general, mRNA or cDNA generated from mRNA using a polymerase enzyme can be purified and separated using gel electrophoresis, and transferred to a solid support, such as nitrocellulose. The solid support is exposed to a labeled probe, washed to remove any unhybridized probe, and duplexes containing the labeled probe are detected.

[0107] Mapping.

[0108] Polynucleotides of the present invention can be used to identify a chromosome on which the corresponding gene resides. Such mapping can be useful in identifying the function of the polynucleotide-related gene by its proximity to other genes with known function. Function can also be assigned to the polynucleotide-related gene when particular syndromes or diseases map to the same chromosome. For example, use of polynucleotide probes in identification and quantification of nucleic acid sequence aberrations is described in U.S. Pat. No. 5,783,387. An exemplary mapping method is fluorescence in situ hybridization (FISH), which facilitates comparative genomic hybridization to allow total genome assessment of changes in relative copy number of DNA sequences (see, e.g., Valdes et al., Methods in Molecular Biology (1997) 68: 1). Polynucleotides can also be mapped to particular chromosomes using, for example, radiation hybrids or chromosome-specific hybrid panels. See Leach et al., Advances in Genetics, (1995) 33:63-99; Walter et al., Nature Genetics (1994) 7:22; Walter and Goodfellow, Trends in Genetics (1992) 9:352. Panels for radiation hybrid mapping are available from Research Genetics, Inc., Huntsville, Ala., USA. Databases for markers using various panels are publicly available via the world wide web from the Stanford Genome Center and The Whitehead Institute for Biomedical Research/MIT Center for Genome Research. The statistical program RHMAP can be used to construct a map based on the data from radiation hybridization with a measure of the relative likelihood of one order versus another. RHMAP is available via the world wide web from the University of Michigan, Center for Statistical Genetics, Ann Arbor, Mich. In addition, commercial programs are available for identifying regions of chromosomes commonly associated with disease, such as cancer.

[0109] Tissue Typing or Profiling.

[0110] Expression of specific mRNA corresponding to the provided polynucleotides can vary in different cell types and can be tissue-specific. This variation of mRNA levels in different cell types can be exploited with nucleic acid probe assays to determine tissue types. For example, PCR, branched DNA probe assays, or blotting techniques utilizing nucleic acid probes substantially identical or complementary to polynucleotides listed in the Sequence Listing can determine the presence or absence of the corresponding cDNA or mRNA.

[0111] Tissue typing can be used to identify the developmental organ or tissue source of a metastatic lesion by identifying the expression of a particular marker of that organ or tissue. If a polynucleotide is expressed only in a specific tissue type, and a metastatic lesion is found to express that polynucleotide, then the developmental source of the lesion has been identified. Expression of a particular polynucleotide can be assayed by detection of either the corresponding mRNA or the protein product. As would be readily apparent to any forensic scientist, the sequences disclosed herein are useful in differentiating human tissue from non-human tissue. In particular, these sequences are useful to differentiate human tissue from bird, reptile, and amphibian tissue, for example.

[0112] Use of Polymorphisms.

[0113] A polynucleotide of the invention can be used in forensics, genetic analysis, mapping, and diagnostic applications where the corresponding region of a gene is polymorphic in the human population. Any means for detecting a polymorphism in a gene can be used, including, but not limited to electrophoresis of protein polymorphic variants, differential sensitivity to restriction enzyme cleavage, and hybridization to allele-specific probes.

[0114] Antibody Production

[0115] Expression products of a polynucleotide of the invention, as well as the corresponding mRNA, cDNA, or complete gene, can be prepared and used for raising antibodies for experimental, diagnostic, and therapeutic purposes. For polynucleotides to which a corresponding gene has not been assigned, this provides an additional method of identifying the corresponding gene. The polynucleotide or related cDNA is expressed as described above, and antibodies are prepared. These antibodies are specific to an epitope on the polypeptide encoded by the polynucleotide, and can precipitate or bind to the corresponding native protein in a cell or tissue preparation or in a cell-free extract of an in vitro expression system.

[0116] Methods for production of antibodies that specifically bind a selected antigen are well known in the art. Immunogens for raising antibodies can be prepared by mixing a polypeptide encoded by a polynucleotide of the invention with an adjuvant, and/or by making fusion proteins with larger imrnunogenic proteins. Polypeptides can also be covalently linked to other larger immunogenic proteins, such as keyhole limpet hemocyanin. Immunogens are typically administered intradermally, subcutaneously, or intramuscularly to experimental animals such as rabbits, sheep, and mice, to generate antibodies. Monoclonal antibodies can be Monoclonal antibodies can be generated by isolating spleen cells and fusing myeloma cells to form hybridomas. Alternatively, the selected polynucleotide is administered directly, such as by intramuscular injection, and expressed in vivo. The expressed protein generates a variety of protein-specific immune responses, including production of antibodies, comparable to administration of the protein.

[0117] Preparations of polyclonal and monoclonal antibodies specific for polypeptides encoded by a selected polynucleotide are made using standard methods known in the art. The antibodies specifically bind to epitopes present in the polypeptides encoded by polynucleotides disclosed in the Sequence Listing. Typically, at least 6, 8, 10, or 12 contiguous amino acids are required to form an epitope. Epitopes that involve non-contiguous amino acids may require a longer polypeptide, e.g., at least 15, 25, or 50 amino acids. Antibodies that specifically bind to human polypeptides encoded by the provided polypeptides should provide a detection signal at least 5-, 10-, or 20-fold higher than a detection signal provided with other proteins when used in Western blots or other immunochemical assays. Preferably, antibodies that specifically polypeptides of the invention do not bind to other proteins in immunochemical assays at detectable levels and can immunoprecipitate the specific polypeptide from solution.

[0118] The invention also contemplates naturally occurring antibodies specific for a polypeptide of the invention. For example, serum antibodies to a polypeptide of the invention in a human population can be purified by methods well known in the art, e.g., by passing antiserum over a C column to which the corresponding selected polypeptide or fusion protein is bound. The bound antibodies can then be eluted from the column, for example using a buffer with a high salt concentration.

[0119] In addition to the antibodies discussed above, the invention also contemplates genetically engineered antibodies, antibody derivatives (e.g., single chain antibodies, antibody fragments (e.g., Fab, etc.)), according to methods well known in the art.

[0120] Polynucleotides or Arrays for Diagnostics

[0121] Polynucleotide arrays provide a high throughput technique that can assay a large number of polynucleotide sequences in a sample. This technology can be used as a diagnostic and as a tool to test for differential expression, e.g., to determine function of an encoded protein. Arrays can be created by spotting polynucleotide probes onto a substrate (e.g., glass, nitrocelllose, etc.) in a two-dimensional matrix or array having bound probes. The probes can be bound to the substrate by either covalent bonds or by non-specific interactions, such as hydrophobic interactions. Samples of polynucleotides can be detectably labeled (e.g., using radioactive or fluorescent labels) and then hybridized to the probes. Double stranded polynucleotides, comprising the labeled sample polynucleotides bound to probe polynucleotides, can be detected once the unbound portion of the sample is washed away. Techniques for constructing arrays and methods of using these arrays are described in EP 799 897; WO 97/29212; WO 97/27317; EP 785 280; WO 97/02357; U.S. Pat. Nos. 5,593,839; 5,578,832; EP 728 520; U.S. Pat. No. 5,599,695; EP 721 016; U.S. Pat. No. 5,556,752; WO 95/22058; and U.S. Pat. No. 5,631,734. Arrays can be used to, for example, examine differential expression of genes and can be used to determine gene function. For example, arrays can be used to detect differential expression of a polynucleotide between a test cell and control cell (e.g., cancer cells and normal cells). For example, high expression of a particular message in a cancer cell, which is not observed in a corresponding normal cell, can indicate a cancer specific gene product. Exemplary uses of arrays are further described in, for example, Pappalarado et al., Sem. Radiation Oncol. (1998) 8:217; and Ramsay Nature Biotechnol. (1998) 16:40.

[0122] Differential Expression in Diagnosis

[0123] The polynucleotides of the invention can also be used to detect differences in expression levels between two cells, e.g., as a method to identify abnormal or diseased tissue in a human. For polynucleotides corresponding to profiles of protein families, the choice of tissue can be selected according to the putative biological function. In general, the expression of a gene corresponding to a specific polynucleotide is compared between a first tissue that is suspected of being diseased and a second, normal tissue of the human. The tissue suspected of being abnormal or diseased can be derived from a different tissue type of the human, but preferably it is derived from the same tissue type; for example an intestinal polyp or other abnormal growth should be compared with normal intestinal tissue. The normal tissue can be the same tissue as that of the test sample, or any normal tissue of the patient, especially those that express the polynucleotide-related gene of interest (e.g., brain, thymus, testis, heart, prostate, placenta, spleen, small intestine, skeletal muscle, pancreas, and the mucosal lining of the colon). A difference between the polynucleotide-related gene, mRNA, or protein in the two tissues which are compared, for example in molecular weight, amino acid or nucleotide sequence, or relative abundance, indicates a change in the gene, or a gene which regulates it, in the tissue of the human that was suspected of being diseased. Examples of detection of differential expression and its use in diagnosis of cancer are described in U.S. Pat. Nos. 5,688,641 and 5,677,125.

[0124] A genetic predisposition to disease in a human can also be detected by comparing expression levels of an mRNA or protein corresponding to a polynucleotide of the invention in a fetal tissue with levels associated in normal fetal tissue. Fetal tissues that are used for this purpose include, but are not limited to, amniotic fluid, chorionic villi, blood, and the blastomere of an in vitro-fertilized embryo. The comparable normal polynucleotide-related gene is obtained from any tissue. The mRNA or protein is obtained from a normal tissue of a human in which the polynucleotide-related gene is expressed. Differences such as alterations in the nucleotide sequence or size of the same product of the fetal polynucleotide-related gene or mRNA, or alterations in the molecular weight, amino acid sequence, or relative abundance of fetal protein, can indicate a germiline mutation in the polynucleotide-related gene of the fetus, which indicates a genetic predisposition to disease. In general, diagnostic, prognostic, and other methods of the invention based on differential expression involve detection of a level or amount of a gene product, particularly a differentially expressed gene product, in a test sample obtained from a patient suspected of having or being susceptible to a disease (e.g., breast cancer, lung cancer, colon cancer and/or metastatic forms thereof), and comparing the detected levels to those levels found in normal cells (e.g., cells substantially unaffected by cancer) and/or other control cells (e.g., to differentiate a cancerous cell from a cell affected by dysplasia). Furthermore, the severity of the disease can be assessed by comparing the detected levels of a differentially expressed gene product with those levels detected in samples representing the levels of differentially gene product associated with varying degrees of severity of disease. It should be noted that use of the term “diagnostic” herein is not necessarily meant to exclude “prognostic” or “prognosis,” but rather is used as a matter of convenience.

[0125] The term “differentially expressed gene” is generally intended to encompass a polynucleotide that can, for example, include an open reading frame encoding a gene product (e.g., a polypeptide), and/or introns of such genes and adjacent 5′ and 3′ non-coding nucleotide sequences involved in the regulation of expression, up to about 20 kb beyond the coding region, but possibly further in either direction. The gene can be introduced into an appropriate vector for extrachromosomal maintenance or for integration into a host genome. In general, a difference in expression level associated with a decrease in expression level of at least about 25%, usually at least about 50% to 75%, more usually at least about 90% or more is indicative of a differentially expressed gene of interest, i.e., a gene that is underexpressed or down-regulated in the test sample relative to a control sample. Furthermore, a difference in expression level associated with an increase in expression of at least about 25%, usually at least about 50% to 75%, more usually at least about 90% and can be at least about 1 I2-fold, usually at least about 2-fold to about 10-fold, and can be about 100-fold to about 1,000-fold increase relative to a control sample is indicative of a differentially expressed gene of interest, i.e., an overexpressed or up-regulated gene.

[0126] “Differentially expressed polynucleotide” as used herein means a nucleic acid molecule (RNA or DNA) comprising a sequence that represents a differentially expressed gene, e.g., the differentially expressed polynucleotide comprises a sequence (e.g., an open reading frame encoding a gene product) that uniquely identifies a differentially expressed gene so that detection of the differentially expressed polynucleotide in a sample is correlated with the presence of a differentially expressed gene in a sample. “Differentially expressed polynucleotides” is also meant to encompass fragments of the disclosed polynucleotides, e.g., fragments retaining biological activity, as well as nucleic acids homologous, substantially similar, or substantially identical (e.g., having about 90% sequence identity) to the disclosed polynucleotides.

[0127] “Diagnosis” as used herein generally includes determination of a subject's susceptibility to a disease or disorder, determination as to whether a subject is presently affected by a disease or disorder, as well as to the prognosis of a subject affected by a disease or disorder (e.g., identification of pre-metastatic or metastatic cancerous states, stages of cancer, or responsiveness of cancer to therapy). The present invention particularly encompasses diagnosis of subjects in the context of breast cancer (e.g., carcinoma in situ (e.g., ductal carcinoma in situ), estrogen receptor (ER)-positive breast cancer, ER-negative breast cancer, or other forms and/or stages of breast cancer), lung cancer (e.g., small cell carcinoma, non-small cell carcinoma, mesothelioma, and other forms and/or stages of lung cancer), and colon cancer (e.g., adenomatous polyp, colorectal carcinoma, and other forms and/or stages of colon cancer).

[0128] “Sample” or “biological sample” as used throughout here are generally meant to refer to samples of biological fluids or tissues, particularly samples obtained from tissues, especially from cells of the type associated with the disease for which the diagnostic application is designed (e.g., ductal adenocarcinoma), and the like. “Samples” is also meant to encompass derivatives and fractions of such samples (e.g., cell lysates). Where the sample is solid tissue, the cells of the tissue can be dissociated or tissue sections can be analyzed.

[0129] Methods of the subject invention useful in diagnosis or prognosis typically involve comparison of the abundance of a selected differentially expressed gene product in a sample of interest with that of a control to determine any relative differences in the expression of the gene -product, where the difference can be measured qualitatively and/or quantitatively. Quantitation can be accomplished, for example, by comparing the level of expression product detected in the sample with the amounts of product present in a standard curve. A comparison can be made visually; by using a technique such as densitometry, with or without computerized assistance; by preparing a representative library of cDNA clones of mRNA isolated from a test sample, sequencing the clones in the library to determine that number of cDNA clones corresponding to the same gene product, and analyzing the number of clones corresponding to that same gene product relative to the number of clones of the same gene product in a control sample; or by using an array to detect relative levels of hybridization to a selected sequence or set of sequences, and comparing the hybridization pattern to that of a control. The differences in expression are then correlated with the presence or absence of an abnormal expression pattern. A variety of different methods for determining the nucleic acid abundance in a sample are known to those of skill in the art (see, e.g., WO 97/27317).

[0130] In general, diagnostic assays of the invention involve detection of a gene product of a the polynucleotide sequence (e.g., mRNA or polypeptide) that corresponds to a sequence of SEQ ID NOS:1-2396 The patient from whom the sample is obtained can be apparently healthy, susceptible to disease (e.g., as determined by family history or exposure to certain environmental factors), or can already be identified as having a condition in which altered expression of a gene product of the invention is implicated.

[0131] Diagnosis can be determined based on detected gene product expression levels of a gene product encoded by at least one, preferably at least two or more, at least 3 or more, or at least 4 or more of the polynucleotides having a sequence set forth in SEQ ID NOS:1-2396, and can involve detection of expression of genes corresponding to all of SEQ ID NOS:1-2396 and/or additional sequences that can serve as additional diagnostic markers and/or reference sequences. Where the diagnostic method is designed to detect the presence or susceptibility of a patient to cancer, the assay preferably involves detection of a gene product encoded by a gene corresponding to a polynucleotide that is differentially expressed in cancer. Examples of such differentially expressed polynucleotides are described in the Examples below. Given the provided polynucleotides and information regarding their relative expression levels provided herein, assays using such polynucleotides and detection of their expression levels in diagnosis and prognosis will be readily apparent to the ordinarily skilled artisan.

[0132] Any of a variety of detectable labels can be used in connection with the various embodiments of the diagnostic methods of the invention. Suitable detectable labels include fluorochromes,(e.g. fluorescein isothiocyanate (FITC), rhodamine, Texas Red, phycoerythrin, allophycocyanin, 6-carboxyfluorescein (6-FAM), 2′,7′-dimethoxy-4′,5′-dichloro-6-carboxyfluorescein, 6-carboxy-X-rhodamine (ROX), 6-carboxy-2′,4′,7′,4,7-hexachlorofluorescein (HEX), 5-carboxyfluorescein (5-FAM) or N,N,N′,N′-tetramethyl-6-carboxyrhodamine (TAMRA)), radioactive labels, (e.g. ³²P, 35S, ³H, etc.), and the like. The detectable label can involve a two stage systems (e.g., biotin-avidin, hapten-anti-hapten antibody, etc.).

[0133] Reagents specific for the polynucleotides and polypeptides of the invention, such as antibodies and nucleotide probes, can be supplied in a kit for detecting the presence of an expression product in a biological sample. The kit can also contain buffers or labeling components, as well as instructions for using the reagents to detect and quantify expression products in the biological sample. Exemplary embodiments of the diagnostic methods of the invention are described below in more detail.

[0134] Polypeptide Detection in Diagnosis.

[0135] In one embodiment, the test sample is assayed for the level of a differentially expressed polypeptide. Diagnosis can be accomplished using any of a number of methods to determine the absence or presence or altered amounts of the differentially expressed polypeptide in the test sample. For example, detection can utilize staining of cells or histological sections with labeled antibodies, performed in accordance with conventional methods. Cells can be permeabilized to stain cytoplasmic molecules. In general, antibodies that specifically bind a differentially expressed polypeptide of the invention are added to a sample, and incubated for a period of time sufficient to allow binding to the epitope, usually at least about 10 minutes. The antibody can be detectably labeled for direct detection (e.g., using radioisotopes, enzymes, fluorescers, chemiluminescers, and the like), or can be used in conjunction with a second stage antibody or reagent to detect binding (e.g., biotin with horseradish peroxidase-conjugated avidin, a secondary antibody conjugated to a fluorescent compound, e.g. fluorescein, rhodamine, Texas red, etc.). The absence or presence of antibody binding can be determined by various methods, including flow cytometry of dissociated cells, microscopy, radiography, scintillation counting, etc. Any suitable alternative methods can of qualitative or quantitative detection of levels or amounts of differentially expressed polypeptide can be used, for example ELISA, western blot, immunoprecipitation, radioimmunoassay, etc.

[0136] mRNA Detection.

[0137] The diagnostic methods of the invention can also or alternatively involve detection of mRNA encoded by a gene corresponding to a differentially expressed polynucleotides of the invention. Any suitable qualitative or quantitative methods known in the art for detecting specific mRNAs can be used. mRNA can be detected by, for example, in situ hybridization in tissue -sections, by reverse transcriptase-PCR, or in Northern blots containing poly A+ mRNA. One of skill in the art can readily use these methods to determine differences in the size or amount of mRNA transcripts between two samples. mRNA expression levels in a sample can also be determined by generation of a library of expressed sequence tags (ESTs) from the sample, where the EST library is representative of sequences present in the sample (Adams, et al., (1991) Science 252:1651). Enumeration of the relative representation of ESTs within the library can be used to approximate the relative representation of the gene transcript within the starting sample. The results of EST analysis of a test sample can then be compared to EST analysis of a reference sample to determine the relative expression levels of a selected polynucleotide, particularly a polynucleotide corresponding to one or more of the differentially expressed genes described herein. Alternatively, gene expression in a test sample can be performed using serial analysis of gene expression (SAGE) methodology (e.g., Velculescu et al., Science (1995) 270:484) or differential display (DD) methodology (see, e.g. U.S. Pat. No. 5,776,683; and U.S. Pat. No. 5,807,680).

[0138] Alternatively, gene expression can be analyzed using hybridization analysis. Oligonucleotides or cDNA can be used to selectively identify or capture DNA or RNA of specific sequence composition, and the amount of RNA or cDNA hybridized to a known capture sequence determined qualitatively or quantitatively, to provide information about the relative representation of a particular message within the pool of cellular messages in a sample. Hybridization analysis can be designed to allow for concurrent screening of the relative expression of hundreds to thousands of genes by using, for example, array-based technologies having high density formats, including filters, microscope slides, or microchips, or solution-based technologies that use spectroscopic analysis (e.g., mass spectrometry). One exemplary use of arrays in the diagnostic methods of the invention is described below in more detail.

[0139] Use of a Single Gene in Diagnostic Applications.

[0140] The diagnostic methods of the invention can focus on the expression of a single differentially expressed gene. For example, the diagnostic method can involve detecting a differentially expressed gene, or a polymorphism of such a gene (e.g., a polymorphism in an coding region or control region), that is associated with disease.

[0141] Disease-associated polymorphisms can include deletion or truncation of the gene, mutations that alter expression level and/or affect activity of the encoded protein, etc.

[0142] A number of methods are available for analyzing nucleic acids for the presence of a specific sequence, e.g. a disease associated polymorphism. Where large amounts of DNA are available, genomic DNA is used directly. Alternatively, the region of interest is cloned into a suitable vector and grown in sufficient quantity for analysis. Cells that express a differentially expressed gene can be used as a source of mRNA, which can be assayed directly or reverse transcribed into cDNA for analysis. The nucleic acid can be amplified by conventional techniques, such as the polymerase chain reaction (PCR), to provide sufficient amounts for analysis, and a detectable label can be included in the amplification reaction (e.g., using a detectably labeled primer or detectably labeled oligonucleotides) to facilitate detection. Alternatively, various methods are also known in the art that utilize oligonucleotide ligation as a means of detecting polymorphisms, see e.g., Riley et al., Nucl. Acids Res. (1990) 18:2887; and Delahunty et al., Am. J. Hum. Genet. (1996) 58:1239.

[0143] The amplified or cloned sample nucleic acid can be analyzed by one of a number of methods known in the art. The nucleic acid can be sequenced by dideoxy or other methods, and the sequence of bases compared to a selected sequence, e.g., to a wild-type sequence. Hybridization with the polymorphic or variant sequence can also be used to determine its presence in a sample (e.g. by Southern blot, dot blot, etc.). The hybridization pattern of a polymorphic or variant sequence and a control sequence to an array of oligonucleotide probes immobilized on a solid support, as described in U.S. Pat. No. 5,445,934, or in WO 95/35505, can also be used as a means of identifwwing polymorphic or variant sequences associated with disease. Single strand conformational polymorphism (SSCP) analysis, denaturing gradient gel electrophoresis (DGGE), and heteroduplex analysis in gel matrices are used to detect conformational changes created by DNA sequence variation as alterations in electrophoretic mobility. Alternatively, where a polymorphism creates or destroys a recognition site 355 for a restriction endonuclease, the sample is digested with that endonuclease, and the products size fractionated to determine whether the fragment was digested. Fractionation is performed by gel or capillary electrophoresis, particularly acrylamide or agarose gels.

[0144] Screening for mutations in a gene can be based on the functional or antigenic characteristics of the protein. Protein truncation assays are useful in detecting deletions that can affect the biological activity of the protein. Various immunoassays designed to detect polymorphisms in proteins can be used in screening. Where many diverse genetic mutations lead to a particular disease phenotype, functional protein assays have proven to be effective screening tools. The activity of the encoded protein can be determined by comparison with the wild-type protein.

[0145] Pattern Matching in Diagnosis Using Arrays.

[0146] In another embodiment, the diagnostic and/or prognostic methods of the invention involve detection of expression of a selected set of genes in a test sample to produce a test expression pattern (TEP). The TEP is compared to a reference expression pattern (REP), which is generated by detection of expression of the selected set of genes in a reference sample (e.g., a positive or negative control sample). The selected set of genes includes at least one of the genes of the invention, which genes correspond to the polynucleotide sequences of SEQ ID NOS:1-2396. Of particular interest is a selected set of genes that includes gene differentially expressed in the disease for which the test sample is to be screened.

[0147] “Reference sequences” or “reference polynucleotides” as used herein in the context of differential gene expression analysis and diagnosis/prognosis refers to a selected set of polynucleotides, which selected set includes at least one or more of the differentially expressed polynucleotides described herein. A plurality of reference sequences, preferably comprising positive and negative control sequences, can be included as reference sequences. Additional suitable reference sequences are found in GenBank, Unigene, and other nucleotide sequence databases (including, e.g., expressed sequence tag (EST), partial, and full-length sequences).

[0148] “Reference array” means an array having reference sequences for use in hybridization with a sample, where the reference sequences include all, at least one of, or any subset of the differentially expressed polynucleotides described herein. Usually such an array will include at least 3 different reference sequences, and can include any one or all of the provided differentially expressed sequences. Arrays of interest can further comprise sequences, including polymorphisms, of other genetic sequences, particularly other sequences of interest for screening for a disease or disorder (e.g., cancer, dysplasia, or other related or unrelated diseases, disorders, or conditions). The oligonucleotide sequence on the array will usually be at least about 12 nt in length, and can be of about the length of the provided sequences, or can extend into the flanking regions to generate fragments of 100 nt to 200 nt in length or more. Reference arrays can be produced according to any suitable methods known in the art. For example, methods of producing large arrays of oligonucleotides are described in U.S. Pat. Nos. 5,134,854, and 5,445,934 using light-directed synthesis techniques. Using a computer controlled system, a heterogeneous array of monomers is converted, through simultaneous coupling at a number of reaction sites, into a heterogeneous array of polymers. Alternatively, microarrays are generated by deposition of pre-synthesized oligonucleotides onto a solid substrate, for example as described in PCT published application no. WO 95/35505.

[0149] A “reference expression pattern” or “REP” as used herein refers to the relative levels of expression of a selected set of genes, particularly of differentially expressed genes, that is associated with a selected cell type, e.g., a normal cell, a cancerous cell, a cell exposed to an environmental stimulus, and the like. A “test expression pattern” or “TEP” refers to relative levels of expression of a selected set of genes, particularly of differentially expressed genes, in a test sample (e.g. a cell of unknown or suspected disease state, from which mRNA is isolated).

[0150] REPs can be generated in a variety of ways according to methods well known in the art. For example, REPs can be generated by hybridizing a control sample to an array having a selected set of polynucleotides (particularly a selected set of differentially expressed polynucleotides), acquiring the hybridization data from the array, and storing the data in a format that allows for ready comparison of the REP with a TEP. Alternatively, all expressed sequences in a control sample can be isolated and sequenced, e.g., by isolating mRNA from a control sample, converting the mRNA into cDNA, and sequencing the cDNA. The resulting sequence information roughly or precisely reflects the identity and relative number of expressed sequences in the sample. The sequence information can then be stored in a format (e.g., a computer-readable format) that allows for ready comparison of the REP with a TEP. The REP can be normalized prior to or after data storage, and/or can be processed to selectively remove sequences of expressed genes that are of less interest or that might complicate analysis (e.g., some or all of the sequences associated with housekeeping genes can be eliminated from REP data).

[0151] TEPs can be generated in a manner similar to REPs, e.g., by hybridizing a test sample to an array having a selected set of polynucleotides, particularly a selected set of differentially expressed polynucleotides, acquiring the hybridization data from the array, and storing the data in a format that allows for ready comparison of the TEP with a REP. The REP and TEP to be used in a comparison can be generated simultaneously, or the TEP can be compared to previously generated and stored REPs.

[0152] In one embodiment of the invention, comparison of a TEP with a REP involves hybridizing a test sample with a reference array, where the reference array has one or more reference sequences for use in hybridization with a sample. The reference sequences include all, at least one of, or any subset of the differentially expressed polynucleotides described herein. Hybridization data for the test sample is acquired, the data normalized, and the produced TEP compared with a REP generated using an array having the same or similar selected set of differentially expressed polynucleotides. Probes that correspond to sequences differentially expressed between the two samples will show decreased or increased hybridization efficiency for one of the samples relative to the other.

[0153] Methods for collection of data from hybridization of samples with a reference arrays are well known in the art. For example, the polynucleotides of the reference and test samples can be generated using a detectable fluorescent label, and hybridization of the polynucleotides in the samples detected by scanning the microarrays for the presence of the detectable label using, for example, a microscope and light source for directing light at a substrate. A photon counter detects fluorescence from the substrate, while an x-y translation stage varies the location of the substrate. A confocal detection device that can be used in the subject methods is described in U.S. Pat. No. 5,631,734.A scanning laser microscope is described in Shalon et al., Genome Res. (1996) 6:639. A scan, using the appropriate excitation line, is performed for each fluorophore used. The digital images generated from the scan are then combined for subsequent analysis. For any particular array element, the ratio of the fluorescent signal from one sample (e.g., a test sample) is compared to the fluorescent signal from another sample (e.g., a reference sample), and the relative signal intensity determined.

[0154] Methods for analyzing the data collected from hybridization to arrays are well known in the art. For example, where detection of hybridization involves a fluorescent label, data analysis can include the steps of determining fluorescent intensity as a function of substrate position from the data collected, removing outliers, i.e. data deviating from a predetermined statistical distribution, and calculating the relative binding affinity of the targets from the remaining data. The resulting data can be displayed as an image with the intensity in each region varying according to the binding affinity between targets and probes.

[0155] In general, the test sample is classified as having a gene expression profile corresponding to that associated with a disease or non-disease state by comparing the TEP generated from the test sample to one or more REPs generated from reference samples (e.g., from samples associated with cancer or specific stages of cancer, dysplasia, samples affected by a disease other than cancer, normal samples, etc.). The criteria for a match or a substantial match between a TEP and a REP include expression of the same or substantially the same set of reference genes, as well as expression of these reference genes at substantially the same levels (e.g., no significant difference between the samples for a signal associated with a selected reference sequence after normalization of the samples, or at least no greater than about 25% to about 40% difference in signal strength for a given reference sequence. In general, a pattern match between a TEP and a REP includes a match in expression, preferably a match in qualitative or quantitative expression level, of at least one of, all or any subset of the differentially expressed genes of the invention.

[0156] Pattern matching can be performed manually, or can be performed using a computer program. Methods for preparation of substrate matrices (e.g., arrays), design of oligonucleotides for use with such matrices, labeling of probes, hybridization conditions, scanning of hybridized matrices, and analysis of patterns generated, including comparison analysis, are described in, for example, U.S. Pat. No. 5,800,992.

[0157] Targets for Inhibtion of Tumor Growth.

[0158] The polynucleotides of the invention can correspond to therapeutic targets, and modulation of expression and/or activity of these targets can provide for inhibition of tumor growth. For example, where overexpression of a gene is associated with tumor growth or metastasis, the gene product is a suitable for target for inhibition of its expression and/or activity to facilitate inihibtion of tumor growth or metastasis. The polynucleotides of the invention can correspond to such genes, and thus in some embodiments the antisense of these polynucleotides can be used to inhibit the expression of the gene and its corresponding gene product.

[0159] Diagnosis Prognosis and Management of Cancer

[0160] The polynucleotides of the invention and their gene products are of particular interest as genetic or biochemical markers (e.g., in blood or tissues) that will detect the earliest changes along the carcinogenesis pathway and/or to monitor the efficacy of various therapies and preventive interventions. For example, the level of expression of certain polynucleotides can be indicative of a poorer prognosis, and therefore warrant more aggressive chemo- or radio-therapy for a patient or vice versa. The correlation of novel surrogate tumor specific features with response to treatment and outcome in patients can define prognostic indicators that allow the design of tailored therapy based on the molecular profile of the tumor. These therapies include antibody targeting and gene therapy. Determining expression of certain polynucleotides and comparison of a patients profile with known expression in normal tissue and variants of the disease allows a determination of the best possible treatment for a patient, both in terms of specificity of treatment and in terms of comfort level of the patient. Surrogate tumor markers, such as polynucleotide expression, can also be used to better classify, and thus diagnose and treat, different forms and disease states of cancer. Two classifications widely used in oncology that can benefit from identification of the expression levels of the polynucleotides of the invention are staging of the cancerous disorder, and grading the nature of the cancerous tissue.

[0161] The polynucleotides of the invention can be useful to monitor patients having or susceptible to cancer to detect potentially malignant events at a molecular level before they are detectable at a gross morphological level. Furthermore, a polynucleotide of the invention identified as important for one type of cancer can also have implications for development or risk of development of other types of cancer, e.g., where a polynucleotide is differentially expressed across various cancer types. Thus, for example, expression of a polynucleotide that has clinical implications for metastatic colon cancer can also have clinical implications for stomach cancer or endometrial cancer.

[0162] Staging.

[0163] Staging is a process used by physicians to describe how advanced the cancerous state is in a patient. Staging assists the physician in determining a prognosis, planning treatment and evaluating the results of such treatment. Staging systems vary with the types of cancer, but generally involve the following “TNM” system: the type of tumor, indicated by T; whether the cancer has metastasized to nearby lymph nodes, indicated by N; and whether the cancer has metastasized to more distant parts of the body, indicated by M. Generally, if a cancer is only detectable in the area of the primary lesion without having spread to any lymph nodes it is called Stage I. If it has spread only to the closest lymph nodes, it is called Stage II. In Stage III, the cancer has generally spread to the lymph nodes in near proximity to the site of the primary lesion. Cancers that have spread to a distant part of the body, such as the liver, bone, brain or other site, are Stage TV, the most advanced stage.

[0164] The polynucleotides of the invention can facilitate fine-tuning of the staging process by identifying markers for the aggresivity of a cancer, e.g. the metastatic potential, as well as the presence in different areas of the body. Thus, a Stage II cancer with a polynucleotide signifying a high metastatic potential cancer can be used to change a borderline Stage II tumor to a Stage III tumor, justifying more aggressive therapy. Conversely, the presence of a polynucleotide signifying a lower metastatic potential allows more conservative staging of a tumor.

[0165] Grading of Cancers.

[0166] Grade is a term used to describe how closely a tumor resembles normal tissue of its same type. The microscopic appearance of a tumor is used to identify tumor grade based on parameters such as cell morphology, cellular organization, and other markers of differentiation. As a general rule, the grade of a tumor corresponds to its rate of growth or aggressiveness, with undifferentiated or high-grade tumors being more aggressive than well differentiated or low-grade tumors. The following guidelines are generally used for grading tumors: 1) GX Grade cannot be assessed; 2) G1 Well differentiated; G2 Moderately well differentiated; 3) G3 Poorly differentiated; 4) G4 Undifferentiated. The polynucleotides of the invention can be especially valuable in determining the grade of the tumor, as they not only can aid in determining the differentiation status of the cells of a tumor, they can also identify factors other than differentiation that are valuable in determining the aggressiveness of a tumor, such as metastatic potential.

[0167] Detection of Lung Cancer.

[0168] The polynucleotides of the invention can be used to detect lung cancer in a subject. Although there are more than a dozen different kinds of lung cancer, the two main types of lung cancer are small cell and nonsmall cell, which encompass about 90% of all lung cancer cases. Small cell carcinoma (also called oat cell carcinoma) usually starts in one of the larger bronchial tubes, grows fairly rapidly, and is likely to be large by the time of diagnosis. Nonsmall cell lung cancer (NSCLC) is made up of three general subtypes of lung cancer. Epidermoid carcinoma (also called squamous cell carcinoma) usually starts in one of the larger bronchial tubes and grows relatively slowly. The size of these tumors can range from very small to quite large.

[0169] Adenocarcinoma starts growing near the outside surface of the lung and can vary in both size and growth rate. Some slowly growing adenocarcinomas are described as alveolar cell cancer. Large cell carcinoma starts near the surface of the lung, grows rapidly, and the growth is usually fairly large when diagnosed. Other less common forms of lung cancer are carcinoid, cylindroma, mucoepidermoid, and malignant mesothelioma.

[0170] The polynucleotides of the invention, e.g., polynucleotides differentially expressed in normal cells versus cancerous lung cells (e.g., tumor cells of high or low metastatic potential) or between types of cancerous lung cells (e.g., high metastatic versus low metastatic), can be used to distinguish types of lung cancer as well as identifying traits specific to a certain patient's cancer and selecting an appropriate therapy. For example, if the patient's biopsy expresses a polynucleotide that is associated with a low metastatic potential, it may justify leaving a larger portion of the patient's lung in surgery to remove the lesion. Alternatively, a smaller lesion with expression of a polynucleotide that is associated with high metastatic potential may justify a more radical removal of lung tissue and/or the surrounding lymph nodes, even if no metastasis can be identified through pathological examination.

[0171] Detection of Breast Cancer.

[0172] The majority of breast cancers are adenocarcinomas subtypes, which can be summarized as follows: 1) ductal carcinoma in situ (DCIS), including comedocarcinoma; 2) infiltrating (or invasive) ductal carcinoma (lDC); 3) lobular carcinoma in situ (LCIS); 4) infiltrating (or invasive) lobular carcinoma (ILC); 5) inflammatory breast cancer; 6) medullary carcinoma; 7) mucinous carcinoma; 8) Paget's disease of the nipple; 9) Phyllodes tumor; and 10) tubular carcinoma;

[0173] The expression of polynucleotides of the invention can be used in the diagnosis and management of breast cancer, as well as to distinguish between types of breast cancer. Detection of breast cancer can be determined using expression levels of any of the appropriate polynucleotides of the invention, either alone or in combination. Determination of the aggressive nature and/or the metastatic potential of a breast cancer can also be determined by comparing levels of one or more polynucleotides of the invention and comparing levels of another sequence known to vary in cancerous tissue, e.g. ER expression. In addition, development of breast cancer can be detected by examining the ratio of expression of a differentially expressed polynucleotide to the levels of steroid hormones (e.g., testosterone or estrogen) or to other hormones (e.g., growth hormone, insulin). Thus expression of specific marker polynucleotides can be used to discriminate between normal and cancerous breast tissue, to discriminate between breast cancers with different cells of origin, to discriminate between breast cancers with different potential metastatic rates, etc.

[0174] Detection of Colon Cancer.

[0175] The polynucleotides of the invention exhibiting the appropriate expression pattern can be used to detect colon cancer in a subject. Colorectal cancer is one of the most common neoplasms in humans and perhaps the most frequent form of hereditary neoplasia. Prevention and early detection are key factors in controlling and curing colorectal cancer. Colorectal cancer begins as polyps, which are small, benign growths of cells that form on the inner lining of the colon. Over a period of several years, some of these polyps accumulate additional mutations and become cancerous. Multiple familial colorectal cancer disorders have been identified, which are summarized as follows: 1) Familial adenomatous polyposis (FAP); 2) Gardner's syndrome; 3) Hereditary nonpolyposis colon cancer (HNPCC); and 4) Familial colorectal cancer in Ashkenazi Jews. The expression of appropriate polynucleotides of the invention can be used in the diagnosis, prognosis and management of colorectal cancer. Detection of colon cancer can be determined using expression levels of any of these sequences alone or in combination with the levels of expression. Determination of the aggressive nature and/or the metastatic potential of a colon cancer can be determined by comparing levels of one or more polynucleotides of the invention and comparing total levels of another sequence known to vary in cancerous tissue, e.g., expression of p53, DCC ras, lor FAP (see, e.g., Fearon E R, et al., Cell (1990) 61 (5):759; Hamilton S R et al., Cancer (1993) 72:957; Bodmer W, et al., Nat Genet. (1994) 4(3):217; Fearon E R, Ann N Y Acad Sci. (1995) 768:101). For example, development of colon cancer can be detected by examining the ratio of any of the polynucleotides of the invention to the levels of oncogenes (e.g. ras) or tumor suppressor genes (e.g. FAP or p53). Thus expression of specific marker polynucleotides can be used to discriminate between normal and cancerous colon tissue, to discriminate between colon cancers with different cells of origin, to discriminate between colon cancers with different potential metastatic rates, etc.

[0176] Detection of Prostate Cancer.

[0177] The polynucleotides and their corresponding genes and gene products exhibiting the appropriate differential expression pattern can be used to detect prostate cancer in a subject. Over 95% of primary prostate cancers are adenocarcinomas. Signs and symptoms may include: frequent urination, especially at night, inability to urinate, trouble starting or holding back urination, a weak or interrupted urine flow and frequent pain or stiffness in the lower back, hips or upper thighs.

[0178] Many of the signs and symptoms of prostate cancer can be caused by a variety of other non-cancerous conditions. For example, one common cause of many of these signs and symptoms is a condition called benign prostatic hypertrophy, or BPH. In BPH, the prostate gets bigger and may block the flow or urine or interfere with sexual function. The methods and compositions of the invention can be used to distinguish between prostate cancer and such non-cancerous conditions. The methods of the invention can be used in conjunction with conventional methods of diagnosis, e.g., digital rectal exam and/or detection of the level of prostate specific antigen (PSA), a substance produced and secreted by the prostate.

[0179] Use of Polynucleotides to Screen for Peptide Analogs and Antagonists

[0180] Polypeptides encoded by the instant polynucleotides and corresponding full length genes can be used to screen peptide libraries to identify binding partners, such as receptors, from among the encoded polypeptides. Peptide libraries can be synthesized according to methods known in the art (see, e.g., U.S. Pat. No. 5,010,175 , and WO 91/17823). Agonists or antagonists of the polypeptides if the invention can be screened using any available method known in the art, such as signal transduction, antibody binding, receptor binding, mitogenic assays, chemotaxis assays, etc. The assay conditions ideally should resemble the conditions under which the native activity is exhibited in vivo, that is, under physiologic pH, temperature, and ionic strength. Suitable agonists or antagonists will exhibit strong inhibition or enhancement of the native activity at concentrations that do not cause toxic side effects in the subject. Agonists or antagonists that compete for binding to the native polypeptide can require concentrations equal to or greater than the native concentration, while inhibitors capable of binding irreversibly to the polypeptide can be added in concentrations on the order of the native concentration.

[0181] Such screening and experimentation can lead to identification of a novel polypeptide binding partner, such as a receptor, encoded by a gene or a cDNA corresponding to a polynucleotide of the invention, and at least one peptide agonist or antagonist of the novel binding partner. Such agonists and antagonists can be used to modulate, enhance, or inhibit receptor function in cells to which the receptor is native, or in cells that possess the receptor as a result of genetic engineering. Further, if the novel receptor shares biologically important characteristics with a known receptor, information about agonist/antagonist binding can facilitate development of improved agonists/antagonists of the known receptor.

[0182] Pharmaceutical Compositions and Therapeutic Uses

[0183] Pharmaceutical compositions of the invention can comprise polypeptides, antibodies, or polynucleotides (including antisense nucleotides and ribozymes) of the claimed invention in a therapeutically effective amount. The term “therapeutically effective amount” as used herein refers to an amount of a therapeutic agent to treat, ameliorate, or prevent a desired disease or condition, or to exhibit a detectable therapeutic or preventative effect. The effect can be detected by, for example, chemical markers or antigen levels. Therapeutic effects also include reduction in physical symptoms, such as decreased body temperature. The precise effective amount for a subject will depend upon the subjects size and health, the nature and extent of the condition, and the therapeutics or combination of therapeutics selected for administration. Thus, it is not useful to specify an exact effective amount in advance. However, the effective amount for a given situation is determined by routine experimentation and is within the judgment of the clinician. For purposes of the present invention, an effective dose will generally be from about 0.01 mg/kg to 50 mg/kg or 0.05 mg/kg to about 10 mg/kg of the DNA constructs in the individual to which it is administered.

[0184] A pharmaceutical composition can also contain a pharmaceutically acceptable carrier. The term “pharmaceutically acceptable carrier” refers to a carrier for administration of a therapeutic agent, such as antibodies or a polypeptide, genes, and other therapeutic agents. The term refers to any pharmaceutical carrier that does not itself induce the production of antibodies harmful to the individual receiving the composition, and which can be administered without undue toxicity. Suitable carriers can be large, slowly metabolized macromolecules such as proteins, polysaccharides, polylactic acids, polyglycolic acids, polymeric amino acids, amino acid copolymers, and inactive virus particles. Such carriers are well known to those of ordinary skill in the art. Pharmaceutically acceptable carriers in therapeutic compositions can include liquids such as water, saline, glycerol and ethanol. Auxiliary substances, such as wetting or emulsifying agents, pH buffering substances, and the like, can also be present in such vehicles. Typically, the therapeutic compositions are prepared as injectables, either as liquid solutions or suspensions; solid forms suitable for solution in, or suspension in, liquid vehicles prior to injection can also be prepared. Liposomes are included within the definition of a pharmaceutically acceptable carrier. Pharmaceutically acceptable salts can also be present in the pharmaceutical composition, e.g., mineral acid salts such as hydrochlorides, hydrobromides, phosphates, sulfates, and the like; and the salts of organic acids such as acetates, propionates, malonates, benzoates, and the like. A thorough discussion of pharmaceutically acceptable excipients is available in Remington 's Pharmaceutical Sciences (Mack Pub. Co., N.J. 1991).

[0185] Delivery Methods.

[0186] Once formulated, the compositions of the invention can be (1) administered directly to the subject (e.g., as polynucleotide or polypeptides); or (2) delivered ex vivo, to cells derived from the subject (e.g., as in ex vivo gene therapy). Direct delivery of the compositions will generally be accomplished by parenteral injection, e.g., subcutaneously, intraperitoneally, intravenously or intramuscularly, intratumoral or to the interstitial space of a tissue. Other modes of administration include oral and pulmonary administration, suppositories, and transdermal applications, needles, and gene guns or hyposprays. Dosage treatment can be a single dose schedule or a multiple dose schedule.

[0187] Methods for the ex vivo delivery and reimplantation of transformed cells into a subject are known in the art and described in e.g., International Publication No. WO 93/14778. Examples of cells useful in ex vivo applications include, for example, stem cells, particularly hematopoetic, lymph cells, macrophages, dendritic cells, or tumor cells. Generally, delivery of nucleic acids for both ex vivo and in vitro applications can be accomplished by, for example, dextran-mediated transfection, calcium phosphate precipitation, polybrene mediated transfection, protoplast fusion, electroporation, encapsulation of the polynucleotide(s) in liposomes, and direct microinjection of the DNA into nuclei, all well known in the art.

[0188] Once a gene corresponding to a polynucleotide of the invention has been found to correlate with a proliferative disorder, such as neoplasia, dysplasia, and hyperplasia, the disorder can be amenable to treatment by administration of a therapeutic agent based on the provided polynucleotide, corresponding polypeptide or other corresponding molecule (e.g., antisense, ribozyme, etc.).

[0189] The dose and the means of administration of the inventive pharmaceutical compositions are determined based on the specific qualities of the therapeutic composition, the condition, age, and weight of the patient, the progression of the disease, and other relevant factors. For example, administration of polynucleotide therapeutic compositions agents of the invention includes local or systemic administration, including injection, oral administration, particle gun or catheterized administration, and topical administration. Preferably, the therapeutic polynucleotide composition contains an expression construct comprising a promoter operably linked to a polynucleotide of at least 12, 22, 25, 30, or 35 contiguous nt of the polynucleotide disclosed herein. Various methods can be used to administer the therapeutic composition directly to a specific site in the body. For example, a small metastatic lesion is located and the therapeutic composition injected several times in several different locations within the body of tumor. Alternatively, arteries which serve a tumor are identified, and the therapeutic composition injected into such an artery, in order to deliver the composition directly into the tumor. A tumor that has a necrotic center is aspirated and the composition injected directly into the now empty center of the tumor. The antisense composition is directly administered to the surface of the tumor, for example, by topical application of the composition. X-ray imaging is used to assist in certain of the above delivery methods. Receptor-mediated targeted delivery of therapeutic compositions containing an antisense polynucleotide, subgenomic polynucleotides, or antibodies to specific tissues can also be used.

[0190] Receptor-mediated DNA delivery techniques are described in, for example, Findeis et al., Trends Biotechnol. (1993) 11:202; Chiou et al., Gene Therapeutics: Methods And Applications Of Direct Gene Transfer (J. A. Wolff, ed.) (1994); Wu et al., J. Biol. Chem. (1988) 263:621; Wu et al., J. Biol. Chem. (1994) 269:542; Zenke et al., Proc. Natl. Acad. Sci. (USA) (1990) 87:3655; Wu et al., J. Biol. Chem. (1991) 266:338. Therapeutic compositions containing a polynucleotide are administered in a range of about 100 ng to about 200 mg of DNA for local administration in a gene therapy protocol. Concentration ranges of about 500 ng to about 50 mg, about 1 μg to about 2 mg, about 5 μg to about 500 μg, and about 20 μg to about 100 μg of DNA can also be used during a gene therapy protocol. Factors such as method of action (e.g., for enhancing or inhibiting levels of the encoded gene product) and efficacy of transformation and expression are considerations which will affect the dosage required for ultimate efficacy of the antisense subgenomic polynucleotides. Where greater expression is desired over a larger area of tissue, larger amounts of antisense subgenomic polynucleotides or the same amounts readministered in a successive protocol of administrations, or several administrations to different adjacent or close tissue portions of, for example, a tumor site, may be required to effect a positive therapeutic outcome. In all cases, routine experimentation in clinical trials will determine specific ranges for optimal therapeutic effect. For polynucleotide related genes encoding polypeptides or proteins with anti-inflammatory activity, suitable use, doses, and administration are described in U.S. Pat. No. 5,654,173.

[0191] The therapeutic polynucleotides and polypeptides of the present invention can be delivered using gene delivery vehicles. The gene delivery vehicle can be of viral or non-viral origin (see generally, Jolly, Cancer Gene Therapy (1994) 1:51; Kimura, Human Gene Therapy (1994) 5:845; Connelly, Human Gene Therapy (1995) 1:185; and Kaplitt, Nature Genetics (1994) 6:148). Expression of such coding sequences can be induced using endogenous mammalian or heterologous promoters. Expression of the coding sequence can be either constitutive or regulated.

[0192] Viral-based vectors for delivery of a desired polynucleotide and expression in a desired cell are well known in the art. Exemplary viral-based vehicles include, but are not limited to, recombinant retroviruses (see, e.g., WO 90/07936; WO 94/03622; WO 93/25698; WO 93/25234; U.S. Pat. No. 5,219,740; WO 93/11230; WO 93/10218; U.S. Pat. No. 4,777,127; GB Patent No. 2,200,651; EP 0 345 242; and WO 91/02805), alphavirus-based vectors (e.g., Sindbis virus vectors, Semliki forest virus (ATCC VR-67; ATCC VR-1247), Ross River virus (ATCC VR-373; ATCC VR-1246) and Venezuelan equine encephalitis virus (ATCC VR-923; ATCC VR-1250; ATCC VR 1249; ATCC VR-532), and adeno-associated virus (AAV) vectors (see, e.g., WO 94/12649, WO 93/03769; WO 93/19191; WO 94/28938; WO 95/11984 and WO 95/00655). Administration of DNA linked to killed adenovirus as described in Curiel, Hum. Gene Ther. (1992) 3:147 can also be employed.

[0193] Non-viral delivery vehicles and methods can also be employed, including, but not limited to, polycationic condensed DNA linked or unlinked to killed adenovirus alone (see, e.g., Curiel, Hum. Gene Ther. (1992) 3:147); ligand-linked DNA(see, e.g., Wu, J. Biol. Chem. (1989) 264:16985); eukaryotic cell delivery vehicles cells (see, e.g., U.S. Pat. No. 5,814,482; WO 95/07994; WO 96/17072;WO 95/30763; and WO 97/42338) and nucleic charge neutralization or fusion with cell membranes. Naked DNA can also be employed. Exemplary naked DNA introduction methods are described in WO 90/11092 and U.S. Pat. No. 5,580,859. Liposomes that can act as gene delivery vehicles are described in U.S. Pat. No. 5,422,120; WO 95/13796; WO 94/23697; WO 91/14445; and EP 0524968. Additional approaches are described in Philip, Mol. Cell Biol. (1994) 14:2411, and in Woffendin, Proc. Natl. Acad. Sci. (1994) 91:1581.

[0194] Further non-viral delivery suitable for use includes mechanical delivery systems such as the approach described in Woffendin et al., Proc. Natl. Acad. Sci. USA (1994) 91 (24):11581. Moreover, the coding sequence and the product of expression of such can be delivered through deposition of photopolymerized hydrogel materials or use of ionizing radiation (see, e.g., U.S. Pat. No. 5,206,152 and WO 92/11033). Other conventional methods for gene delivery that can be used for delivery of the coding sequence include, for example, use of hand-held gene transfer particle gun (see, e.g., U.S. Pat. No. 5,149,655); use of ionizing radiation for activating transferred gene (see, e.g., U.S. Pat. No. 5,206,152 and WO 92/11033).

[0195] The present invention will now be illustrated by reference to the following examples which set forth particularly advantageous embodiments. However, it should be noted that these embodiments are illustrative and are not to be construed as restricting the invention in any way.

### EXAMPLES

[0196] The following examples are offered primarily for purposes of illustration. It will be readily apparent to those skilled in the art that the formulations, dosages, methods of administration, and other parameters of this invention may be further modified or substituted in various ways without departing from the spirit and scope of the invention.

### Example 1

### Source of Biological Materials and Overview of Novel Polynucleotides Expressed by the Biological Materials

[0197] cDNA libraries were constructed from mRNA isolated from the cell lines indicated in Table 4. The specific library from which any polynucleotide was isolated is indicated in Table 1, with the number of the entry under the “LIBRARY” column correlating to the library number in Table 4. Polynucleotides expressed by the selected cell lines were isolated and analyzed; the sequences of these polynucleotides were about 275-300 nucleotides in length.

[0198] The sequences of the isolated polynucleotides were first masked to eliminate low complexity sequences using the XBLAST masking program (Clayerie “Effective Large-Scale Sequence Similarity Searches,” In: Computer Methods for Macromolecular Sequence Analysis, Doolittle, ed., Meth. Enzymol. 266:212-227 Academic Press, NY, NY (1996); see particularly Clayerie, in “Automated DNA Sequencing and Analysis Techniques” Adams et al., eds., Chap. 36, p. 267 Academic Press, San Diego, 1994 and Clayerie et al. Comput. Chem. (1993) 17:191). Generally, masking does not influence the final search results, except to eliminate sequences of relative little interest due to their low complexity, and to eliminate multiple “hits” based on similarity to repetitive regions common to multiple sequences, e.g., Alu repeats. The remaining sequences were then used in a BLASTN vs. GenBank search; sequences that exhibited greater than 70% overlap, 99% identity, and a p value of less than 1×10⁻⁴⁰ were discarded. Sequences from this search also were discarded if the inclusive parameters were met, but the sequence was ribosomal or vector-derived.

[0199] The resulting sequences from the previous search were classified into three groups (1, 2 and 3 below) and searched in a BLASTX vs. NRP (non-redundant proteins) database search: (1) unknown (no hits in the GenBank search), (2) weak similarity (greater than 45% identity and p value of less than 1×10⁻⁵), and (3) high similarity (greater than 60% overlap, greater than 80% identity, and p value less than 1×10⁻⁵). Sequences having greater than 70% overlap, greater than 99% identity, and p value of less than 1×10⁻⁴⁰ were discarded.

[0200] The remaining sequences were classified as unknown (no hits), weak similarity, and high similarity (parameters as above). Two searches were performed on these sequences. First, a BLAST vs. EST database search was performed and sequences with greater than 99% overlap, greater than 99% similarity and a p value of less than 1×10⁻⁴⁰ were discarded. Sequences with a p value of less than 1×10⁻⁶⁵ when compared to a database sequence of human origin were also excluded. Second, a BLASTN vs. Patent GeneSeq database was performed and sequences having greater than 99% identity, p value less than 1×10⁻⁴⁰, and greater than 99% overlap were discarded.

[0201] The remaining sequences were subjected to screening using other rules and redundancies in the dataset. Sequences with a p value of less than 1×10⁻¹¹¹ in relation to a database sequence of human origin were specifically excluded. The final result provided the 2396 sequences listed as SEQ ID NOS:1-2396 in the accompanying Sequence Listing and summarized in Table 1 (inserted prior to claims). Each identified polynucleotide represents sequence from at least a partial mRNA transcript.

[0202] Table 1 provides: 1) the SEQ ID NO assigned to each sequence for use in the present specification; 2) the cluster to which the sequence is assigned; 3) the sequence name used as an internal identifier of the sequence; 4) the orientation of the insert in the clone (F=forward; R=reverse); 5) the name assigned to the clone from which the sequence was isolated; and 6) the library from which the sequence was originally isolated. Because the provided polynucleotides represent partial mRNA transcripts, two or more polynucleotides of the invention may represent different regions of the same mRNA transcript and the same gene. Thus, if two or more SEQ ID NOS: are identified as belonging to the same clone, then either sequence can be used to obtain the full-length mRNA or gene.

### Example 2

### Results of Public Database Search to Identify Function of Gene Products

[0203] SEQ ID NOS:1-2396 were translated in all three reading frames, and the nucleotide sequences and translated amino acid sequences used as query sequences to search for homologous sequences in either the GenBank (nucleotide sequences) or Non-Redundant Protein (amino acid sequences) databases. Query and individual sequences were aligned using the BLAST 2.0 programs (National Center for Biotechnology Information, Bethesda, Md.; see also Altschul, et al. Nucleic Acids Res. (1997) 25:3389-3402). The sequences were masked to various extents to prevent searching of repetitive sequences or poly-A sequences, using the XBLAST program for masking low complexity as described above in Example 1.

[0204] Tables 2A and 2B (inserted before the claims) provide the alignment summaries having a p value of 1×10⁻² or less indicating substantial homology between the sequences of the present invention and those of the indicated public databases. Table 2A provides the SEQ ID NO of the query sequence, the accession number of the GenBank database entry of the homologous sequence, and the p value of the alignment. Table 2B provides the SEQ ID NO of the query sequence, the t& accession number of the Non-Redundant Protein database entry of the homologous sequence, and the p value of the alignment. The alignments provided in Tables 2A and 2B are the best available alignment to a DNA or amino acid sequence at a time just prior to filing of the present specification. The activity of the polypeptide encoded by the SEQ ID NOS listed in Tables 2A and 2B can be extrapolated to be substantially the same or substantially similar to the activity of the reported nearest neighbor or closely related sequence. The accession number of the nearest neighbor is reported, providing a publicly available reference to the activities and functions exhibited by the nearest neighbor. The public information regarding the activities and functions of each of the nearest neighbor sequences is incorporated by reference in this application. Also incorporated by reference is all publicly available information regarding the sequence, as well as the putative and actual activities and functions of the nearest neighbor sequences listed in Table 2B and their related sequences. The search program and database used for the alignment, as well as the calculation of the p value are also indicated.

[0205] Full length sequences or fragments of the polynucleotide sequences of the nearest neighbors can be used as probes and primers to identify and isolate the full length sequence of the corresponding polynucleotide. The nearest neighbors can indicate a tissue or cell type to be used to construct a library for the full-length sequences of the corresponding polynucleotides.

### Example 3

### Members of Protein Families

[0206] SEQ ID NOS:1-2396 were used to conduct a profile search as described in the specification above. Several of the polynucleotides of the invention were found to encode polypeptides having characteristics of a polypeptide belonging to a known protein family (and thus represent members of these protein families) and/or comprising a known functional domain. Table provides the SEQ ID NO: of the query sequence, the profile name, and a brief description of the profile hit.

TABLE 3

| SEQ ID | Profilename | Description |
|---|---|---|
| 410 | ATPases | ATPases Associated with Various Cellular |
| | | Activities |
| 537 | ATPases | ATPases Associated with Various Cellular |
| | | Activities |
| 539 | ATPases | ATPases Associated with Various Cellular |
| | | Activities |
| 540 | ATPases | ATPases Associated with Various Cellular |
| | | Activities |
| 662 | rrm | RNA recognition motif. (aka RRM, RBD, |
| | | or RNP domain) |
| 683 | rrm | RNA recognition motif. (aka RRM, RBD, |
| | | or RNP domain) |
| 707 | dualspecphosphatase | Dual specificity phosphatase, catalytic |
| | | domain |
| 708 | rrm | RNA recognition motif. (aka RRM, RBD, |
| | | or RNP domain) |
| 719 | EFhand | EF-hand |
| 738 | ATPases | ATPases Associated with Various Cellular |
| | | Activities |
| 779 | Zincfing_C2H2 | Zinc finger, C2H2 type |
| 781 | rrm | RNA recognition motif. (aka RRM, RBD, |
| | | or RNP domain) |
| 783 | rrm | RNA recognition motif. (aka RRM, RBD, |
| | | or RNP domain) |
| 1110 | WD_domain | WD domain, G-beta repeats |
| 1415 | Dead_box_helic | DEAD and DEAH box helicases |
| 1533 | C2 | C2 domain (prot. kinase C like) |
| 1633 | dualspecphosphatase | Dual specificity phosphatase, catalytic |
| | | domain |
| 1637 | Dead_box_helic | DEAD and DEAH box helicases |
| 1638 | Dead_box_helic | DEAD and DEAH box helicases |
| 1744 | WD_domain | WD domain, G-beta repeats |
| 1759 | BZIP | Basic region plus leucine zipper |
| | | transcription factors |
| 1993 | WD_domain | WD domain, G-beta repeats |
| 2083 | WD_domain | WD domain, G-beta repeats |
| 2209 | ATPases | ATPases Associated with Various Cellular |
| | | Activities |
| 2228 | ras | Ras family |
| 2287 | ras | Ras family |
| 2300 | neur_chan | Neurotransmitter-gated ion-channel |
| 2302 | tor_domain2 | kinase domain of tors (Christoph |
| | | Reinhard) |
| 2306 | homeobox | Homeobox Domain |
| 2318 | Metallothion | Metallothioneins |
| 2327 | asp | Eukaryotic aspartyl proteases |

[0207] Some polynucleotides exhibited multiple profile hits where the query sequence contains overlapping profile regions, and/or where the sequence contains two different functional domains.

[0208] Each of the profile hits of Table 3 are described in more detail below. The acronyms for the profiles (provided in parentheses) are those used to identify the profile in the Pfam and Prosite databases. The Pfam database can be accessed through web sites supported by the Washington University, St. Louis (Mo.), The Sanger Centre (United Kingdom); and The Karolinska Institute Center for Genomics Research. The Prosite database is publicaly available through the ExPASy Molecular Biology Server. The public information available on the Pfam and Prosite databases regarding the various profiles, including but not limited to the activities, function, and consensus sequences of various proteins families and protein domains, is incorporated herein by reference.

[0209] Eukaryotic Aspartyl Proteases (asp: Pfam Accession No. PF00026).

[0210] SEQ ID NO:2327 corresponds to a gene encoding a novel eukaryotic aspartyl protease. Aspartyl proteases, known as acid proteases, (EC 3.4.23.-) are a widely distributed family of proteolytic enzymes (Foltmann B., Essays Biochem. (1981) 17:52; Davies D. R., Annu. Rev. Biophys. Chem. (1990) 19:189; Rao J. K. M., et al., Biochemistry (1991) 30:4663) known to exist in vertebrates, fungi, plants, retroviruses and some plant viruses. Aspartate proteases of eukaryotes are monomeric enzymes which consist of two domains. Each domain contains an active site centered on a catalytic aspartyl residue. The consensus pattern to identify eukaryotic aspartyl protease is: [LIVMFGAC]-[LWMTADN]-[LIVFSA]-D-[ST]-G-[STAV]-[STAPDENQ]-x-[LIVMFSTNC]-x-[LIVMFGTA], where D is the active site residue.

[0211] ATPases Associated with Various Cellular Activities (ATPases; Pfam Accession No. PF0004).

[0212] SEQ ID NOS:410, 537, 539, 540, 738, and 2209 correspond to a sequence that encodes a member of a family of ATPases Associated with diverse cellular Activities (AAA). The AAA protein family is composed of a large number of ATPases that share a conserved region of about 220 amino acids containing an ATP-binding site (Froehlich et al., J. Cell. Biol. (1991) 114:443; Erdmann et al. Cell (1991) 64:499; Peters et al., EMBO J. (1990) 9:1757; Kunau et al., Biochimie (1993) 75:209-224; Confalonieri et al., BioEssays (1995) 17:639; see also the AAA Server Homepage). The AAA domain, which can be present in one or two copies, acts as an ATP-dependent protein clamp (Confalonieri et al. (1995) BioEssays 17:639) and contains a highly conserved region located in the central part of the domain. The consensus pattern is: [LIVMT]-x-[LIVMT]-[LIVMFI-x-[GATMC]-[ST]-[NS]-x(4)-[LIVM]- D-x-A-[LIFA]-x-R.

[0213] Basic Region Plus Leucine Zipper Transcription Factors (BZIP; Pfam Accession No. PF00170).

[0214] SEQ ID NO: 1759 represents a polynucleotide encoding a novel member of the family of basic region plus leucine zipper transcription factors. The bZIP superfamily (Hurst, Protein Prof. (1995) 2:105; and Ellenberger, Curr. Opin. Struct. Biol. (1994) 4:12) of eukaryotic DNA-binding transcription factors encompasses proteins that contain a basic region mediating sequence-specific DNA-binding followed by a leucine zipper required for dimerization. The consensus pattern for this protein family is: [KR]-x(1,3)-[RKSAQ]-N-x(2)-[SAQ](2)-x-[RKTAENQ]-x-R-x-[RK].

[0215] C2 Domain (C2; Pfam Accession No. PF00168).

[0216] SEQ ID NO:1533 corresponds to a sequence encoding a C2 domain, which is involved in calcium-dependent phospholipid binding (Davletov J. Biol. Chem. (1993)268:26386-26390) or, in proteins that do not bind calcium, the domain may facilitate binding to inositol-1,3,4,5-tetraphosphate (Fukuda et al. J. Biol. Chem. (1994) 269:29206-29211; Sutton et al. Cell (1995) 80:929-938). The consensus sequence is: [ACG]-x(2)-L-x(2,3)-D-x(1,2)-[NGSTLIF]-[GTMR]-x-[STAP]-D- [PA]-[FY].

[0217] DEAD and DEAH Box Families ATP-Dependent Helicases (Dead Box Helic; Pfam Accession No. PF00270).

[0218] SEQ ID NOS:1415, 1637, and 1638 represent polynucleotides encoding a novel member of the DEAD and DEAH box families (Schmid et al., Mol. Microbiol. (1992) 6:283; Linder et al., Nature (1989) 337:121; Wassarman, et al., Nature (1991) 349:463). All members of these families are involved in ATP-dependent, nucleic-acid unwinding. All DEAD box family members share a number of conserved sequence motifs, some of which are specific to the DEAD family, with others shared by other ATP-binding proteins or by proteins belonging to the helicases 'superfamily′ (Hodgman Nature (1988) 333:22 and Nature (1988) 333:578 (Errata)). One of these motifs, called the ‘D-E-A-D-box’, represents a special version of the B motif of ATP-binding proteins. Proteins that have His instead of the second Asp and are ‘D-E-A-H-box’ proteins (Wassarman et al., Nature (1991) 349:463; Harosh, et al., Nucleic Acids Res. (1991) ]9:6331; Koonin, et al., J. Gen. Virol. (1992) 73:989). The following signature patterns are used to identify member for both subfamilies: 1) [LIVMF](2)-D-E-A-D-[RKEN]-x-[LIVMFYGSTN]; and 2) [GSAH]-x-[LIVMF](3)-D-E-[ALIV]-H-[NECR].

[0219] Dual Specificity Phosohatase (DSPc; Pfam Accession No. PF00782).

[0220] SEQ ID NOS:707 and 1633 correspond to sequences that encode members of a family of dual specificity phosphatases (DSPs). DSPs are Ser/Thr and Tyr protein phosphatases that comprise a tertiary fold highly similar to that of tyrosine-specific phosphatases, except for a “recognition” region connecting helix alphal to strand beta1. This tertiary fold may determine differences in substrate specific between VH-1related dual specificity phosphatase (VHR), the protein tyrosine phosphatases (PTPs), and other DSPs. Phosphatases are important in the control of cell growth, proliferation, differentiation and transformation.

[0221] EF Hand (Efhand; Pfam Accession No. PF00036).

[0222] SEQ ID NO:719 corresponds to a polynucleotide encoding a member of the EF-hand protein family, a calcium binding domain shared by many calcium-binding proteins belonging to the same evolutionary family (Kawasaki et al., Protein. Prof. (1995) 2:305-490). The domain is a twelve residue loop flanked on both sides by a twelve residue alpha-helical domain, with a calcium ion coordinated in a pentagonal bipyramidal configuration. The six residues involved in the binding are in positions 1, 3, 5, 7, 9 and 12; these residues are denoted by X, Y, Z, -Y, -X and -Z. The invariant Glu or Asp at position 12 provides two oxygens for liganding Ca (bidentate ligand). The consensus pattern includes the complete EF-hand loop as well as the first residue which follows the loop and which seem to always be hydrophobic: D-x-[DNS]-{ILVFYW}-[DENSTG]-[DNQGHRK]-{GP}-[LIVMC]-[DENQSTAGC]-x(2)-[DE]-[LIVMFYW].

[0223] Homeobox Domain (homeobox: Pfam Accession No. PF00046).

[0224] SEQ ID NO:2306represents a polynucleotide encoding a protein having a homeobox domain. The ‘homeobox’ is a protein domain of 60 amino acids (Gehring In: Guidebook to the Homebox Genes, Duboule D., Ed., ppl-10, Oxford University Press, Oxford, (1994); Buerglin In: Guidebook to the Homebox Genes, pp25-72, Oxford University Press, Oxford, (1994); Gehring Trends Biochem. Sci. (1992) 17:277-280; Gehring et alAnnu. Rev. Genet. (1986) 20:147-173; Schofield Trends Neurosci. (1987) 10:3-6) first identified in number of Drosophila homeotic and segmentation proteins. It is extremely well conserved in many other animals, including vertebrates. This domain binds DNA through a helix-turn-helix type of structure. Several proteins that contain a homeobox domain play an important role in development. Most of these proteins are sequence-specific DNA-binding transcription factors. The homeobox domain is also very similar to a region of the yeast mating type proteins. These are sequence-specific DNA-binding proteins that act as master switches in yeast differentiation by controlling gene expression in a cell type-specific fashion.

[0225] A schematic representation of the homeobox domain is shown below. The helix-tum-helix region is shown by the symbols ‘H’ (for helix), and ‘t’ (for turn).

xxxxxxxxxxxxxxxxxxxxxxxxxxxxxxHHHHHHHHtttHHHHHHHHHxxxxxxxxxx
1 60

[0226] The pattern detects homeobox sequences 24 residues long and spans positions 34 to 57 of the homeobox domain. The consensus pattern is as follows: [LIVMEYG]-[ASLVR]-x(2)-[LIVMSTACN]-x-[LIVM]-x(4)-[LIV]-[RKNQESTAIY]-[LIVFSTNKH]-W-[FYVC]-x-[NDQTAH]-x(5)-[RKNAIMW].

[0227] Metallothioneins (Metalthio; Pfam Accession No. PFOO 131).

[0228] SEQ ID NO:2318 corresponds to a polynucleotide encoding a member of the metallothionein (MT) protein family (Hamer Annu. Rev. Biochem. (1986) 55:913-951; and Kagi et al. Biochemistry (1988) 27:8509-8515), small proteins which bind heavy metals such as zinc, copper, cadmium, nickel, etc., through clusters of thiolate bonds. MT's occur throughout the animal kingdom and are also found in higher plants, fungi and some prokaryotes. On the basis of structural relationships MT's have been subdivided into three classes. Class I includes mammalian MT's as well as MT's from crustacean and molluscs, but with clearly related primary structure. Class II groups together MT's from various species such as sea urchins, fungi, insects and cyanobacteria which display none or only very distant correspondence to class I MT's. Class III MT's are atypical polypeptides containing gamma-glutamylcysteinyl units. The consensus pattern for this protein family is: C-x-C-[GSTAP]-x(2)-C-x-C-x(2)-C-x-C-x(2)-C-x-K.

[0229] Neurotransmitter-Gated Ion-Channel (neur chan; Pfam Accession No. PF00065).

[0230] SEQ ID NO:2300 corresponds to a sequence encoding a neurotransmitter-gated ion channel. Neurotransmitter-gated ion-channels, which provide the molecular basis for rapid signal transmission at chemical synapses, are post-synaptic oligomeric transmembrane complexes that transiently form a ionic channel upon the binding of a specific neurotransmitter. Five types of neurotransmitter-gated receptors are known: 1) nicotinic acetylcholine receptor (AchR); 2) glycine receptor; 3) gamma-aminobutyric-acid (GABA) receptor; 4) serotonin 5HT3 receptor; and 5) glutamate receptor. All known sequences of subunits from neurotransmitter-gated ion-channels are structurally related, and are composed of a large extracellular glycosylated N-terminal ligand-binding domain, followed by three hydrophobic transmembrane regions that form the ionic channel, followed by an intracellular region of variable length. A fourth hydrophobic region is found at the C-terminal of the sequence. The consensus pattern is: C-x-[LIVMFQ]-x-[L MF]-x(2)-[FY]-P-x-D-x(3)-C, where the two C's are linked by a disulfide bond.

[0231] Ras Family Proteins (ras: Pfam Accession No. PF00071).

[0232] SEQ ID NOS:2228 and 2287 represent polynucleotides encoding the ras family of small GTP/GDP-binding proteins (Valencia et al., 1991, Biochemistry 30:4637-4648). Ras family members generally require a specific guanine nucleotide exchange factor (GEF) and a specific GTPase activating protein (GAP) as stimulators of overall GTPase activity. Among ras-related proteins, the highest degree of sequence conservation is found in four regions that are directly involved in guanine nucleotide binding. The first two constitute most of the phosphate and Mg2+ binding site (PM site) and are located in the first half of the G-domain. The other two regions are involved in guanosine binding and are located in the C-terminal half of the molecule. Motifs and conserved structural features of the ras-related proteins are described in Valencia et al., 1991, Biochemistry 30:46374648. A major consensus pattern of ras proteins is: D-T-A-G-Q-E-K-[LF]-G-G-L-R-[DE]-G-Y-Y.

[0233] RNA Recognition Motif (rrm; Pfam Accession No. PF00076).

[0234] SEQ ID NOS:662, 683, 708, 781, and 783 correspond to sequence encoding an RNA recognition motif, also known as an RRM, RBD, or RNP domain. This domain, which is about 90 amino acids long, is contained in eukaryotic proteins that bind single-stranded RNA (Bandziulis et al. Genes Dev. (1989) 3:431437; Dreyfuss et al. Trends Biochem. Sci. (1988) 13:86-91). Two regions within the RNA-binding domain are highly conserved: the first is a hydrophobic segment of six residues (which is called the RNP-2 motif), the second is an octapeptide motif (which is called RNP-1 or RNP-CS). The consensus pattern is: [RK]-G-{EDRKHPCG}-[AGSCI]-[FY]-[LIVA]-x-[FYLM].

[0235] Kinase Domain of Tors (tor domain2).

[0236] SEQ ID NO:2302 corresponds to a member of the TOR lipid kinase protein family. This family is composed of large proteins with a lipid and protein kinase domain and characterized through their sensitivity to rapamycin (an antifungal compound). TOR proteins are involved in signal transduction downstream of P13 kinase and many other signals. TOR (also called FRAP, RAFT) plays a role in regulating protein synthesis and cell growth., and in yeast controls translation initiation and early GI progression. See, e.g., Barbet et al. Mol Biol Cell. (1996) 7(1):25-42; Helliwell et al. Genetics (1998) 148:99-112.

[0237] WD Domain, G-Beta Repeats (WD domain; Pfam Accession No. PF00400).

[0238] SEQ ID NOS:1110, 1744, 1993, and 2083 represent novel members of the WD domain/G-beta repeat family. Beta-transducin (G-beta) is one of the three subunits (alpha, beta, and gamma) of the guanine -nucleotide-binding proteins (G proteins) which act as intermediaries in the transduction of signals generated by transmembrane receptors (Gilman, Annu. Rev. Biochem. (1987) 56:615). The alpha subunit binds to and hydrolyzes GTP; the functions of the beta and gamma subunits are less clear but they seem to be required for the replacement of GDP by GTP as well as for membrane anchoring and receptor recognition. In higher eukaryotes, G-beta exists as a small multigene family of highly conserved proteins of about 340 amino acid residues. Structurally, G-beta consists of eight tandem repeats of about 40 residues, each containing a central Trp-Asp motif (this type of repeat is sometimes called a WD40 repeat). The consensus pattern for the WD domain/G-Beta repeat family -is: [LIVMSTAC]-[LIVMFYWSTAGC]-[LIMSTAG]-[LIVMSTAGC]-x(2)-[DN]-x(2)-[LIVMWSTAC]-x-[LIVMFSTAG]-W-[DEN]-[LIVMFSTAGCN].

[0239] Zinc Finger, C2H2 Type (Zincefing C2H2: Pfam Accession No. PF00096).

[0240] SEQ ID NO:779 corresponds to a polynucleotid encoding a member of the C2H2 type zinc finger protein family, which contain zinc finger domains that facilitate nucleic acid binding (Klug et al., Trends Biochem. Sci. (1987) 12:464; Evans et al., Cell (1988) 52: 1; Payre et al., FEBS Lett. (1988) 234:245; Miller et al., EMBO J. (1985) 4:1609; and Berg, Proc. Natl. Acad. Sci. USA (1988) 85:99).

[0241] In addition to the conserved zinc ligand residues, a number of other positions are also important for the structural integrity of the C2H2 zinc fingers. (Rosenfeld et al., J. Biomol. Struct. Dyn. (1993) 11:557) The best conserved position, which is generally an aromatic or aliphatic residue, is located four residues after the second cysteine. The consensus pattern for C2H2 zinc fingers is: C-x(2,4)-C-x(3)-[LIVMFYWC]-x(8)-H-x(3,5)-H. The two C's and two H's are zinc ligands.

### Example 4

### Differential Expression of Polvnucleotides of the Invention: Description of Libraries and Detection of Differential Expression

[0242] The relative expression levels of the polynucleotides of the invention was assessed in several libraries prepared from various sources, including cell lines and patient tissue samples. Table 4 provides a summary of these libraries, including the shortened library name (used hereafter), the mPNA source used to prepared the cDNA library, and the approximate number of clones in the library.

TABLE 4
Description of cDNA Libraries

| | | Number of |
|---|---|---|
| Library | | Clones in |
| (Lib#) | Description | Library |
| 1 | Human Colon Cell Line Km12 L4: High Metastatic | 308731 |
| | Potential (derived from Km12C) | |
| 2 | Human Colon Cell Line Km12C: Low Metastatic | 284771 |
| | Potential | |
| 3 | Human Breast Cancer Cell Line MDA-MB-231: | 326937 |
| | High Metastatic Potential; micro-mets in lung | |
| 4 | Human Breast Cancer Cell Line MCF7: Non | 318979 |
| | Metastatic | |
| 8 | Human Lung Cancer Cell Line MV-522: High | 223620 |
| | Metastatic Potential | |
| 9 | Human Lung Cancer Cell Line UCP-3: Low | 312503 |
| | Metastatic Potential | |
| 12 | Human microvascular endothelial cells (HMVEC)— | 41938 |
| | UNTREATED (PCR (OligodT) cDNA library) | |
| 13 | Human microvascular endothelial cells (HMVEC)— | 42100 |
| | bFGF TREATED (PCR (OligodT) cDNA library) | |
| 14 | Human microvascular endothelial cells (HMVEC)— | 42825 |
| | VEGF TREATED (PCR (OligodT) cDNA library) | |
| 15 | Normal Colon—UC#2 Patient (MICRO- | 282722 |
| | DISSECTED PCR (OligodT) cDNA library) | |
| 16 | Colon Tumor—UC#2 Patient (MICRO- | 298831 |
| | DISSECTED PCR (OligodT) cDNA library) | |
| 17 | Liver Metastasis from Colon Tumor of UC#2 | 303467 |
| | Patient (MICRODISSECTED PCR (OligodT) | |
| | cDNA library) | |
| 18 | Normal Colon—UC#3 Patient (MICRO- | 36216 |
| | DISSECTED PCR (OligodT) cDNA library) | |
| 19 | Colon Tumor—UC#3 Patient (MICRO- | 41388 |
| | DISSECTED PCR (OligodT) cDNA library) | |
| 20 | Liver Metastasis from Colon Tumor of UC#3 | 30956 |
| | Patient (MICRODISSECTED PCR (OligodT) | |
| | cDNA library) | |
| 21 | GRRpz Cells derived from normal prostate | 164801 |
| | epithelium | |
| 22 | WOca Cells derived from Gleason Grade 4 prostate | 162088 |
| | cancer epithelium | |
| 23 | Normal Lung Epithelium of Patient #1006 | 306198 |
| | (MICRODISSECTED PCR (OligodT) cDNA | |
| | library) | |
| 24 | Primary tumor, Large Cell Carcinoma of Patient | 309349 |
| | #1006 (MICRODISSECTED PCR (OligodT) cDNA | |
| | library) | |

[0243] The KM12L4 cell line (Morikawa, et al., Cancer Research (1988) 48:6863) is derived from the KM12C cell line (Morikawa et al. Cancer Res. (1988) 48:1943-1948),. The KM12C cell line, which is poorly metastatic (low metastatic) was established in culture from a Dukes' stage B₂ surgical specimen (Morikawa et al. Cancer Res. (1988) 48:6863). The KM12L4-A is a highly metastatic subline derived from KM12C (Yeatman et al. Nucl. Acids. Res. (1995) 23:4007; Bao-Ling et al. Proc. Annu. Meet. Am. Assoc. Cancer. Res. (1995) 21:3269). The KM12C and KM12C-derived cell lines (e.g., KM12L4, KMI2L4-A, etc.) are well-recognized in the art as a model cell line for the study of colon cancer (see, e.g., Moriakawa et al., supra; Radinsky et al. Clin. Cancer Res. (1995) 1:19; Yeatman et al., (1995) supra; Yeatman et al. Clin. Exp. Metastasis (1996) 14:246). The MDA-MB-231 cell line was originally isolated from pleural effusions (Cailleau, J. Natl. Cancer. Inst. (1974) 53:661), is of high metastatic potential, and forms poorly differentiated adenocarcinoma grade II in nude mice consistent with breast carcinoma. The MCF7 cell line was derived from a pleural effusion of a breast adenocarcinoma and is non-metastatic. The MDA-MB-231 and MCF-7cell lines are well-recognized in the art as a models for the study of human breast -cancer (see, e.g., Chandrasekaran et al., Cancer Res. (1979) 39:870; Gastpar et al., J Med Chem (1998) 41:4965; Ranson et al., Br J Cancer (1998) 77:1586; and Kuang et al., Nucleic Acids Res (1998) 26:1116).

[0244] The MV-522 cell line is derived from a human lung carcinoma and is of high metastatic potential. The UCP-3 cell line is a low metastatic human lung carcinoma cell line; the MV-522 is a high metastatic variant of UCP-3. These cell lines are well-recognized in the art as models for the study of human lung cancer (see, e.g., Varki et al., Int J Cancer (1987) 40:46 (UCP-3); Varki et al., Tumour Biol. (1990) 11:327; (MV-522 and UCP-3); Varki et al., Anticancer Res. (1990) 10:637; (MV-522); Kelner et al., Anticancer Res (1995) 15:867 (MV-522); and Zhang et al., Anticancer Drugs (1997) 8:696 (MV522)). The samples of libraries 15-20 are derived from two different patients (UC#2, and UC#3). The bFGF-treated HMVEC were prepared by incubation with bFGF at 10 ng/ml for 2 hrs; the VEGF-treated HMVEC were prepared by incubation with 20ng/ml VEGF for 2 hrs. Following incubation with the respective growth factor, the cells were washed and lysis buffer added for RNA preparation. The GRRpz and WOca cell lines were provided by Dr. Donna M. Peehl, Department of Medicine, Stanford University School of Medicine. GRRpz was derived from normal prostate epithelium. The WOca cell line is a Gleason Grade 4 cell line.

[0245] Each of the libraries is composed of a collection of cDNA clones that in turn are representative of the mRNAs expressed in the indicated mRNA source. In order to facilitate the analysis of the millions of sequences in each library, the sequences were assigned to clusters. The concept of “cluster of clones” is derived from a sorting/grouping of cDNA clones based on their hybridization pattern to a panel of roughly 300 7bp oligonucleotide probes (see Drmanac et al., Genomics (1996) 37(1):29). Random cDNA clones from a tissue library are hybridized at moderate stringency to 300 7bp oligonucleotides. Each oligonucleotide has some measure of specific hybridization to that specific clone. The combination of 300 of these measures of hybridization for 300 probes equals the “hybridization signature” for a specific clone. Clones with similar sequence will have similar hybridization signatures. By developing a sorting/grouping algorithm to analyze these signatures, groups of clones in a library can be identified and brought together computationally. These groups of clones are termed “clusters”. Depending on the stringency of the selection in the algorithm (similar to the stringency of hybridization in a classic library cDNA screening protocol), the “purity” of each cluster can be controlled. For example, artifacts of clustering may occur in computational clustering just as artifacts can occur in “wet-lab” screening of a cDNA library with 400 bp cDNA fragments, at even the highest stringency. The stringency used in the implementation of cluster herein provides groups of clones that are in general from the same cDNA or closely related cDNAs. Closely related clones can be a result of different length clones of the same cDNA, closely related clones from highly related gene families, or splice variants of the same cDNA.

[0246] Differential expression for a selected cluster was assessed by first determining the number of cDNA clones corresponding to the selected cluster in the first library (Clones in 1^{st}), and the determining the number of cDNA clones corresponding to the selected cluster in the second library (Clones in 2^{nd}). Differential expression of the selected cluster in the first library relative to the - second library is expressed as a “ratio” of percent expression between the two libraries. In general, the “ratio” is calculated by: 1) calculating the percent expression of the selected cluster in the first library by dividing the number of clones corresponding to a selected cluster in the first library by the total number of clones analyzed from the first library; 2) calculating the percent expression of the selected cluster in the second library by dividing the number of clones corresponding to a selected cluster in a second library by the total number of clones analyzed from the second library; 3) dividing the calculated percent expression from the first library by the calculated percent expression from the second library. If the “number of clones” corresponding to a selected cluster in a library is zero, the value is set at 1 to aid in calculation. The formula used in calculating the ratio takes into account the “depth” of each of the libraries being compared, i.e., the total number of clones analyzed in each library.

[0247] In general, a polynucleotide is said to be significantly differentially expressed between two samples when the ratio value is greater than at least about 2, preferably greater than at least about 3, more preferably greater than at least about 5, where the ratio value is calculated using the method described above. The significance of differential expression is determined using a z score test (Zar, Biostatistical Analysis, Prentice Hall, Inc., USA, “Differences between Proportions,” pp 296-298 (1974).

### Example 5

### Differential Expression of Genes Corresponding to Polynucleotides of the Invention

[0248] A number of polynucleotide sequences have been identified that are differentially expressed between, for example, cells derived from high metastatic potential cancer tissue and low metastatic cancer cells, and between cells derived from metastatic cancer tissue and normal tissue. Evaluation of the levels of expression of the genes corresponding to these sequences can be valuable in diagnosis, prognosis, and/or treatment (e.g., to facilitate rationale design of therapy, monitoring during and after therapy, etc.). Moreover, the genes corresponding to differentially expressed sequences described herein can be therapeutic targets due to their involvement in regulation (e.g., inhibition or promotion) of development of, for example, the metastatic phenotype. For example, sequences that correspond to genes that are increased in expression in high metastatic potential cells relative to normal or non-metastatic tumor cells may encode genes or regulatory sequences involved in processes such as angiogenesis, differentiation, cell replication, and metastasis.

[0249] Detection of the relative expression levels of differentially expressed polynucleotides described herein can provide valuable information to guide the clinician in the choice of therapy. For example, a patient sample exhibiting an expression level of one or more of these polynucleotides that corresponds to a gene that is increased in expression in metastatic or high metastatic potential cells may warrant more aggressive treatment for the patient. In contrast, detection of expression levels of a polynucleotide sequence that corresponds to expression levels associated with that of low metastatic potential cells may warrant a more positive prognosis than the gross pathology would suggest.

[0250] The differential expression of the polynucleotides described herein can thus be used as, for example, diagnostic markers, prognostic markers, for risk assessment, patient treatment and the like.

[0251] These polynucleotide sequences can also be used in combination with other known molecular and/or biochemical markers. The following examples provide relative expression levels of polynucleotides from specified cell lines and patient tissue samples.

[0252] The differential expression data for polynucleotides of the invention that have been identified as being differentially expressed across various combinations of the libraries described above is summarized in Table 5 (inserted prior to the claims). Table 5 provides: 1) the Sequence Identification Number (“SEQ”) assigned to the polynucleotide; 2) the cluster (“CLST”) to which the polynucleotide has been assigned as described above; 3) the library comparisons that resulted in identifcation of the polynucleotide as being differentially expressed (“Library Pair A,B”), with shorthand names of the compared libraries provided in parentheses following the library numbers;, 4) the number of clones corresponding to the polynucleotide in the first library listed (“A”); 5) the number of clones corresponding to the polynucleotide in the second library listed (“B”); 6) the “A/B” where the comparison resulted in a finding that the number of clones in library A is greater than the number of clones in library B; and 7) the “B/A” where the comparison resulted in a finding that the number of clones in library B is greater than the number of clones in library A.

### Example 6

### Source of Biological Materials for Microarray-Based Experiments

[0253] The biological materials used in the experiments described in the subsequent examples relating to microarry data are described below.

[0254] Source of Patient Tissue Samples

[0255] Normal and cancerous tissues were collected from patients using laser capture microdissection (LCM) techniques, which techniques are well known in the art (see, e.g., Ohyama et al. (2000) Biotechniques 29:530-6; Curran et al. (2000) Mol. Pathol. 53:64-8; Suarez-Quian et al. (1999) Biotechniques 26:328-35; Simone et al. (1998) Trends Genet 14:272-6; Conia et al. (1997) J. Clin. Lab. Anal. 11:28-38; Emmert-Buck et al. (1996) Science 274:998-1001). Table 9 (inserted following the last page of the Examples) provides information about each patient from which the samples were isolated, including: the Patient ID and Path ReportID, numbers assigned to the patient and the pathology reports for identification purposes; the anatomical location of the tumor (AnatomicalLoc); The Primary Tumor Size; the Primary Tumor Grade; the Histopathologic Grade; a description of local sites to which the tumor had invaded (Local Invasion); the presence of lymph node metastases (Lymph Node Metastasis); incidence of lymph node metastases (provided as number of lymph nodes positive for metastasis over the number of lymph nodes examined) (Incidence Lymphnode Metastasis); the Regional Lymphnode Grade; the identification or detection of metastases to sites distant to the tumor and their location (Distant Met & Loc);a description of the distant metastases (Description Distant Met); the grade of distant metastasis (Distant Met Grade); and general comments about the patient or the tumor (Comments). Adenoma was not described in any of the patients. ; adenoma dysplasia (described as hyperplasia by the pathologist) was described in Patient ID No. 695. Extranodal extensions were described in two patients, Patient ID Nos. 784 and 791. Lymphovascular invasion was described in seven patients, Patient ID Nos. 128, 278, 517, 534, 784, 786, and 791. Crohn's-like infiltrates were described in seven patients, Patient ID Nos. 52, 264, 268, 392, 393, 784, and 791.

[0256] Polynucleotides on Arrays

[0257] Polynucleotides spotted on the arrays were generated by PCR amplification of clones derived from cDNA libraries. The clones used for amplification were either the clones from which the sequences described herein (SEQ ID NOS:1-2396) were derived, or are clones having inserts with significant polynucleotide sequence overlap wih the sequences described herein (SEQ ID NO: 1-2396) as determined by BLAST2 homology searching.

### Example 7

### Microarray Design

[0258] Each array used in the examples below had an identical spatial layout and control spot set. Each microarray was divided into two areas, each area having an array with, on each half, twelve groupings of 32×12 spots for a total of about 9,216 spots on each array. The two areas are spotted identically which provide for at least two duplicates of each clone per array. Spotting was accomplished using PCR amplified products from 0.5kb to 2.0 kb and spotted using a Molecular Dynamics Gen III spotter according to the manufacturer's recommendations. The first row of each of the 24 regions on the array had about 32 control spots, including 4 negative control spots and 8 test polynucleotides.

[0259] The test polynucleotides were spiked into each sample before the labeling reaction with a range of concentrations from 2-600 pg/slide and ratios of 1:1 . For each array design, two slides were hybridized with the test samples reverse-labeled in the labeling reaction.

[0260] This provided for about 4 duplicate measurements for each clone, two of one color and two of the other, for each sample.

### Example 8

### Identification Of Differentially Expressed Genes

[0261] cDNA probes were prepared from total RNA isolated from the patient cells described in Example 6. Since LCM provides for the isolation of specific cell types to provide a substantially homogenous cell sample, this provided for a similarly pure RNA sample.

[0262] Total RNA was first reverse transcribed into cDNA using a primer containing a T7 RNA polymerase promoter, followed by second strand DNA synthesis. cDNA was then transcribed in vitro to produce antisense RNA using the T7 promoter-mediated expression (see, e.g., Luo et al. (1999) Nature Med 5:117-122), and the antisense RNA was then converted into cDNA. The second set of cDNAs were again transcribed in vitro, using the T7 promoter, to provide antisense RNA. Optionally, the RNA was again converted into cDNA, allowing for up to a third round of T7-mediated amplification to produce more antisense RNA. Thus the procedure provided for two or three rounds of in? vitro transcription to produce the final RNA used for fluorescent labeling. Fluorescent probes were generated by first adding control RNA to the antisense RNA mix, and producing fluorescently labeled cDNA from the RNA starting material. Fluorescently labeled cDNAs prepared from the tumor RNA sample were compared to fluorescently labeled cDNAs prepared from normal cell RNA sample. For example, the cDNA probes from the normal cells were labeled with Cy3 fluorescent dye (green) and the cDNA probes prepared from the tumor cells were labeled with Cy5 fluorescent dye (red).

[0263] The differential expression assay was performed by mixing equal amounts of probes from tumor cells and normal cells of the same patient. The arrays were prehybridized by incubation for about 2 hrs at 60° C. in 5× SSC/0.2% SDS/1 mM EDTA, and then washed three times in water and twice in isopropanol. Following prehybridization of the array, the probe mixture was then hybridized to the array under conditions of high stringency (overnight at 42° C. in 50% formamide, 5X SSC, and 0.2% SDS. After hybridization, the array was washed at 55° C. three times as follows: 1) first wash in 1× SSC/0.2% SDS; 2) second wash in 0.1× SSC/0.2% SDS; and 3) third wash in 0.1× SSC.

[0264] The arrays were then scanned for green and red fluorescence using a Molecular Dynamics Generation III dual color laser-scanner/detector. The images were processed using BioDiscovery Autogene software, and the data from each scan set normalized to provide for a ratio of expression relative to normal. Data from the microarray experiments was analyzed according to the algorithms described in U.S. application serial No. 60/252,358, filed Nov. 20,2000, by E. J. Moler, M. A. Boyle, and F. M. Randazzo, and entitled “Precision and accuracy in cDNA microarray data,” which application is specifically incorporated herein by reference.

[0265] The experiment was repeated, this time labeling the two probes with the opposite color in order to perform the assay in both “color directions.” Each experiment was sometimes repeated with two more slides (one in each color direction). The level fluorescence for each sequence on the array expressed as a ratio of the geometric mean of 8 replicate spots/genes from the four arrays or 4 replicate spots/gene from 2 arrays or some other permutation. The data were normalized using the spiked positive controls present in each duplicated area, and the precision of this normalization was included in the final determination of the significance of each differential. The fluorescent intensity of each spot was also compared to the negative controls in each duplicated area to determine which spots have detected significant expression levels in each sample.

[0266] A statistical analysis of the fluorescent intensities was applied to each set of duplicate spots to assess the precision and significance of each differential measurement, resulting in a p-value testing the null hypothesis that there is no differential in the expression level between the tumor and normal samples of each patient. During initial analysis of the microarrays, the hypothesis was accepted if p>10⁻³, and the differential ratio was set to 1.000 for those spots. All other spots have a significant difference in expression between the tumor and normal sample. If the tumor sample has detectable expression and the normal does not, the ratio is truncated at 1000 since the value for expression in the normal sample would be zero, and the ratio would not be a mathematically useful value (e.g., infinity). If the normal sample has detectable expression and the tumor does not, the ratio is truncated to 0.001, since the value for expression in the tumor sample would be zero and the ratio would not be a mathematically useful value. These latter two situations are referred to herein as “on/off.” Database tables were populated using a 95% confidence level (p>0.05).

[0267] Tables 10-14:clf summarizes the results of the differential expression analysis, where the difference in the expression level in the colon tumor cell relative to the matched normal colon cells is greater than or equal to 2 fold (“>=2×”), 2.5 fold (“>=2.5×”), or 5 fold (“>=5×”) in at least 20% or more of the patients analyzed. Each table provides: the SEQ ID NO; the percentage of patients tested having a colon tumor that exhibited at least 2 fold (“>=2×”), 2.5 fold (“>=2.5×”), or 5 fold (“>=5×”) increase in expression levels of the indicated gene relative to matched normal colon tissue; and the ratio data for each patient sample tested (columns headed by “P#,” indicating the Patient Identification Number, e.g., “P 15” indicates the ration data for patient 15).

[0268] In general, a polynucleotide is said to represent a significantly differentially expressed gene between two samples when there is detectable levels of expression in at least one sample and the ratio value is greater than at least about 1.2 fold, preferably greater than at least about 1.5 fold, more preferably greater than at least about 2 fold, where the ratio value is calculated using the method described above.

[0269] A differential expression ratio of 1 indicates that the expression level of the gene in the tumor cell was not statistically different from expression of that gene in normal colon cells of the same patient. A differential expression ratio significantly greater than I in cancerous colon cells relative to normal colon cells indicates that the gene is increased in expression in cancerous cells relative to normal cells, indicating that the gene plays a role in the development of the cancerous phenotype, and may be involved in promoting metastasis of the cell. Detection of gene products from such genes can provide an indicator that the cell is cancerous, and may provide a therapeutic and/or diagnostic target.

[0270] Likewise, a differential expression ratio significantly less than 1 in cancerous colon cells relative to normal colon cells indicates that, for example, the gene is involved in suppression of the cancerous phenotype. Increasing activity of the gene product encoded by such a gene, or replacing such activity, can provide the basis for chemotherapy. Such gene can also serve as markers of cancerous cells, e.g., the absence or decreased presence of the gene product in a colon cell relative to a normal colon cell indicates that the cell may be cancerous.

### Example 9

### Functional Analysis Of Gene Products Differentially Expressed In Cancer In Patients

[0271] The gene products of genes differentially expressed in cancerous cells are further analyzed to confirm the role and function of the gene product in tumorgenesis, e.g., in promoting or inhibiting development of a metastatic phenotype.

[0272] Blocking Expression of Gene Products Using Antisense

[0273] The effect of single genes upon development of cancer is assessed through use of antisense oligonucleotides specific for sequences corresponding to a selected sequence.

[0274] Antisense oligonucleotides are prepared based upon a selected sequence that corresponds to a gene of interest. The antisense oligonucleotide is introduced into a test cell and the effect upon expression of the corresponding gene, as well as the effect upon a phenotype of interest assessed (e.g., a normal cell is examined for induction of the cancerous phenotype, or a cancerous cell is examined for suppression of a cancerous phenotype (e.g., suppression of metastasis)).

[0275] Blocking Function of Gene Products Using Gene Product-Specific Antibodies and/or Small Molecule Inhibitors

[0276] The function of gene products corresponding to genes/clusters identified herein can be assessed by blocking function of the gene products in the cell. For example, where the gene product is secreted, blocking antibodies can generated and added to cells to examine the effect upon the cell phenotype in the context of, for example, the transformation of the cell to a cancerous, particularly a metastatic, phenotype. In order to generate antibodies, a clone corresponding to a selected gene product/cluster is selected, and a sequence that represents a partial or complete coding sequence is obtained. The resulting clone is then expressed, the polypeptide produced isolated, and antibodies generated. The antibodies are then combined with cells and the effect upon tumorigenesis assessed.

[0277] Where the gene product of the gene/clusters identified herein exhibits sequence homology to a protein of known function (e.g., to a specific kinase or protease) and/or to a protein family of known function (e.g., contains a domain or other consensus sequence present in a protease family or in a kinase family), then the role of the gene product in tumorigenesis, as well as the activity of the gene product, can be examined using small molecule that inhibit or enhance function of the corresponding protein or protein family.

[0278] Those skilled in the art will recognize, or be able to ascertain, using not more than routine experimentation, many equivalents to the specific embodiments of the invention described herein. Such specific embodiments and equivalents are intended to be encompassed by the following claims.

[0279] All publications and patent applications cited in this specification are herein incorporated by reference as if each individual publication or patent application were specifically and individually indicated to be incorporated by reference. The citation of any publication is for its disclosure prior to the filing date and should not be construed as an admission that the present invention is not entitled to antedate such publication by virtue of prior invention.

[0280] Although the foregoing invention has been described in some detail by way of illustration and example for purposes of clarity of understanding, it is readily apparent to those of ordinary skill in the art in light of the teachings of this invention that certain changes and modifications may be made thereto without departing from the spirit or scope of the appended claims.

[0281] Deposit Information.

[0282] The following materials were deposited with the American Type Culture Collection (CMCC=Chiron Master Culture Collection).

TABLE 6
Cell Lines Deposited with ATCC

| | | ATCC | CMCC |
|---|---|---|---|
| Cell Line | Deposit Date | Accession No. | Accession No. |
| KM12L4 | Mar. 19, 1998 | CRL-12496 | 11606 |
| Km12C | May 15, 1998 | CRL-12533 | 11611 |
| MDA-MB-231 | May 15, 1998 | CRL-12532 | 10583 |
| MCF-7 | Oct. 9, 1998 | CRL-12584 | 10377 |

[0283] In addition, pools of selected clones, as well as libraries containing specific clones, were assigned an “ES” number (internal reference) and deposited with the ATCC. Table 7 (inserted before the claims) provides the ATCC Accession Nos. and internal references (CMCC Nos.) of the ES deposits, all of which were deposited on or before the filing date of the present application. The names of the clones contained within each of these deposits are provided in Table 8 (inserted before the claims).

[0284] The above material has been deposited with the American Type Culture Collection, Rockville, Md., under the accession number indicated. These deposits will be maintained under the terms of the Budapest Treaty on the International Recognition of the Deposit of Microorganisms for the Purposes of Patent Procedure. The deposit will be maintained for a period of at least 30 years following issuance of this patent, or for the enforceable life of the patent, whichever is greater. Upon the granting of a patent, all restrictions on the availability to the public of the deposited material will be irrevocably removed.

[0285] The deposits described herein are provided merely as convenience to those of skill in the art, and is not an admission that a deposit is required under 35 U.S.C. §112. The sequence of the polynucleotides contained within the deposited material, as well as the amino acid sequence of the polypeptides encoded thereby, are incorporated herein by reference and are controlling in the event of any conflict with the written description of sequences herein. A license may be required to make, use, or sell the deposited material, and no such license is granted hereby.

[0286] Retrieval of Individual Clones from Deposit of Pooled Clones.

[0287] Where the ATCC deposit is composed of a pool of cDNA clones or a library of cDNA clones, the deposit was prepared by first transfecting each of the clones into separate bacterial cells. The clones in the pool or library were then deposited as a pool of equal mixtures in the composite deposit. Particular clones can be obtained from the composite deposit using methods well known in the art. For example, a bacterial cell containing a particular clone can be identified by isolating single colonies, and identifying colonies containing the specific clone through standard colony hybridization techniques, using an oligonucleotide probe or probes designed to specifically hybridize to a sequence of the clone insert (e.g., a probe based upon unmasked sequence of the encoded polynucleotide having the indicated SEQ ID NO). The probe should be designed to have a Tₘ of approximately 80° C. (assuming 2° C. for each A or T and 4° C. for each G or C). Positive colonies can then be picked, grown in culture, and the recombinant clone isolated. Alternatively, probes designed in this manner can be used to PCR to isolate a nucleic acid molecule from the pooled clones according to methods well known in the art, e.g., by purifying the cDNA from the deposited culture pool, and using the probes in PCR reactions to produce an amplified product having the corresponding desired polynucleotide sequence.

TABLE 7

| Table 7 | | |
|---|---|---|
| ES # | CMCC# | ATCC Deposit# |
| 85 | 5175 | PTA-1313 |
| 86 | 5176 | PTA-1314 |
| 87 | 5177 | PTA-1315 |
| 88 | 5178 | PTA-1316 |
| 89 | 5179 | PTA-1317 |
| 90 | 5180 | PTA-1318 |
| 91 | 5181 | PTA-1319 |
| 92 | 5182 | PTA-1320 |
| 93 | 5183 | PTA-1321 |
| 94 | 5184 | PTA-1322 |
| 95 | 5185 | PTA-1323 |
| 96 | 5186 | PTA-1324 |
| 97 | 5187 | PTA-1325 |
| 98 | 5188 | PTA-1326 |
| 99 | 5189 | PTA-1327 |
| 100 | 5190 | PTA-1328 |
| 101 | 5191 | PTA-1329 |
| 102 | 5192 | PTA-1330 |
| 103 | 5193 | PTA-1331 |
| 104 | 5194 | PTA-1332 |
| 105 | 5195 | PTA-1333 |
| 106 | 5196 | PTA-1334 |
| 107 | 5197 | PTA-1335 |
| 108 | 5198 | PTA-1336 |
| 109 | 5199 | PTA-1372 |
| 110 | 5200 | PTA-1373 |
| 111 | 5201 | PTA-1374 |
| 112 | 5202 | PTA-1375 |
| 113 | 5203 | PTA-1376 |
| 114 | 5204 | PTA-1377 |
| 115 | 5205 | PTA-1378 |
| 116 | 5206 | PTA-1379 |
| 117 | 5207 | PTA-1380 |
| 118 | 5208 | PTA-1381 |
| 122 | 5212 | PTA-1382 |
| 123 | 5213 | PTA-1383 |
| 124 | 5214 | PTA-1384 |
| 125 | 5215 | PTA-1385 |
| 126 | 5216 | PTA-1386 |
| 127 | 5217 | PTA-1387 |
| 128 | 5218 | PTA-1388 |
| 129 | 5219 | PTA-1389 |
| 130 | 5220 | PTA-1390 |
| 131 | 5221 | PTA-1391 |
| 132 | 5222 | PTA-1392 |
| 133 | 5223 | PTA-1393 |
| 134 | 5209 | PTA-1431 |
| 135 | 5210 | PTA-1432 |
| 136 | 5238 | PTA-1497 |

[0288] TABLE 8

| ES No. | Clone Name | ES No. | Clone Name |
|---|---|---|---|
| ES 85 | M00057077B:D02 | ES 109 | M00027658B:G03 |
| ES 85 | M00057078D:C12 | ES 109 | M00027660C:E03 |
| ES 85 | M00057079D:E09 | ES 109 | M00027660C:E03 |
| ES 85 | M00057080C:C02 | ES 109 | M00027665B:D01 |
| ES 85 | M00057085A:A03 | ES 109 | M00027681D:D02 |
| ES 85 | M00057088B:C02 | ES 109 | M00027699D:D02 |
| ES 85 | M00057091A:C03 | ES 109 | M00027717C:G05 |
| ES 85 | M00057091A:C04 | ES 109 | M00027733D:D05 |
| ES 85 | M00057091C:E12 | ES 109 | M00027742C:B01 |
| ES 85 | M00057093B:F09 | ES 109 | M00027742C:B01 |
| ES 85 | M00057099C:C08 | ES 109 | M00027747D:D01 |
| ES 85 | M00057100C:E09 | ES 109 | M00027757A:B06 |
| ES 85 | M00057100D:B03 | ES 109 | M00027781D:E04 |
| ES 85 | M00057103A:E11 | ES 109 | M00027786D:B01 |
| ES 85 | M00057103A:H09 | ES 109 | M00027803A:H10 |
| ES 85 | M00057104B:F08 | ES 109 | M00027806C:H05 |
| ES 85 | M00057106B:A03 | ES 109 | M00027808D:G10 |
| ES 85 | M00057106C:E02 | ES 109 | M00027817B:B11 |
| ES 85 | M00057106D:B06 | ES 109 | M00027820C:C02 |
| ES 85 | M00057108B:F04 | ES 109 | M00027823C:G07 |
| ES 85 | M00057108D:E09 | ES 109 | M00027829C:D02 |
| ES 85 | M00057108D:E09 | ES 109 | M00027833C:D01 |
| ES 85 | M00057112D:B09 | ES 110 | M00042345A:F12 |
| ES 85 | M00057114D:B10 | ES 110 | M00042523A:C05 |
| ES 85 | M00057117D:G11 | ES 110 | M00042523C:E08 |
| ES 85 | M00057118C:C02 | ES 110 | M00042525D:E01 |
| ES 85 | M00057120D:E12 | ES 110 | M00042527B:D07 |
| ES 85 | M00057124B:D10 | ES 110 | M00042528C:F11 |
| ES 85 | M00057127A:F11 | ES 110 | M00042529C:G07 |
| ES 85 | M00057127B:G07 | ES 110 | M00042532A:F08 |
| ES 85 | M00057130C:H11 | ES 110 | M00042534A:B07 |
| ES 85 | M00057131C:B01 | ES 110 | M00042536D:F01 |
| ES 85 | M00057132C:F08 | ES 110 | M00042537A:H05 |
| ES 85 | M00057133D:F01 | ES 110 | M00042538B:E06 |
| ES 85 | M00057134A:C01 | ES 110 | M00042538D:A08 |
| ES 85 | M00057134C:A01 | ES 110 | M00042539C:E05 |
| ES 85 | M00057134D:G10 | ES 110 | M00042540A:H06 |
| ES 85 | M00057135D:H04 | ES 110 | M00042540D:F03 |
| ES 85 | M00057136A:F01 | ES 110 | M00042540D:H05 |
| ES 85 | M00057141B:B02 | ES 110 | M00042543C:H02 |
| ES 85 | M00057141D:D02 | ES 110 | M00042544B:D02 |
| ES 85 | M00057142A:A07 | ES 110 | M00042544C:F10 |
| ES 85 | M00057143C:E05 | ES 110 | M00042547A:A02 |
| ES 85 | M00057145A:D05 | ES 110 | M00042547B:D11 |
| ES 85 | M00057146D:C09 | ES 110 | M00042547C:F02 |
| ES 85 | M00057147A:A01 | ES 110 | M00042551A:D09 |
| ES 85 | M00057150A:C10 | ES 110 | M00042556A:D04 |
| ES 85 | M00057151A:B04 | ES 110 | M00042563C:E02 |
| ES 86 | M00057154A:D06 | ES 110 | M00042563C:E02 |
| ES 86 | M00057154C:B04 | ES 110 | M00042563D:G09 |
| ES 86 | M00057161B:E09 | ES 110 | M00042564B:H11 |
| ES 86 | M00057162A:C07 | ES 110 | M00042565A:H03 |
| ES 86 | M00057162B:H02 | ES 110 | M00042565C:A08 |
| ES 86 | M00057162D:D10 | ES 110 | M00042567D:C01 |
| ES 86 | M00057163D:B01 | ES 110 | M00042570D:H02 |
| ES 86 | M00057165D:E12 | ES 110 | M00042573C:A07 |
| ES 86 | M00057167B:E12 | ES 110 | M00042574B:H08 |
| ES 86 | M00057167B:G12 | ES 110 | M00042575C:D01 |
| ES 86 | M00057167D:B07 | ES 110 | M00042693D:E04 |
| ES 86 | M00057170C:H03 | ES 110 | M00042694C:E02 |
| ES 86 | M00057174B:C06 | ES 110 | M00042695B:H05 |
| ES 86 | M00057174B:G12 | ES 110 | M00042700B:A01 |
| ES 86 | M00057174C:H12 | ES 110 | M00042700B:D03 |
| ES 86 | M00057180A:H11 | ES 110 | M00042700B:D03 |
| ES 86 | M00057181C:D06 | ES 110 | M00042700D:H05 |
| ES 86 | M00057182D:B11 | ES 110 | M00042704A:F04 |
| ES 86 | M00057189B:G05 | ES 110 | M00042704A:F09 |
| ES 86 | M00057191A:A03 | ES 110 | M00042704D:E02 |
| ES 86 | M00057192B:E02 | ES 110 | M00042705A:D02 |
| ES 86 | M00057192D:G02 | ES 110 | M00042706C:A04 |
| ES 86 | M00057196A:E03 | ES 110 | M00054596B:G11 |
| ES 86 | M00057196C:F04 | ES 110 | M00004101C:H01 |
| ES 86 | M00057203C:E06 | ES 111 | M00042711C:G11 |
| ES 86 | M00057208A:A02 | ES 111 | M00042711D:C04 |
| ES 86 | M00057208C:C06 | ES 111 | M00042712B:B10 |
| ES 86 | M00057208C:D08 | ES 111 | M00042717D:D04 |
| ES 86 | M00057211B:F07 | ES 111 | M00042718B:C03 |
| ES 86 | M00057211D:A06 | ES 111 | M00042720C:D06 |
| ES 86 | M00057215B:B02 | ES 111 | M00042720D:G10 |
| ES 86 | M00057217B:B07 | ES 111 | M00042721A:G07 |
| ES 86 | M00057218D:C01 | ES 111 | M00042727C:H12 |
| ES 86 | M00057223C:C06 | ES 111 | M00042728D:E07 |
| ES 86 | M00057224B:C10 | ES 111 | M00042732A:G09 |
| ES 86 | M00057226D:C05 | ES 111 | M00042735C:G02 |
| ES 86 | M00057229D:F06 | ES 111 | M00042735D:A07 |
| ES 86 | M00057230C:D12 | ES 111 | M00042738B:D10 |
| ES 86 | M00057231C:G09 | ES 111 | M00042739D:D01 |
| ES 86 | M00057231D:A09 | ES 111 | M00042741D:D10 |
| ES 86 | M00057232B:D06 | ES 111 | M00042742B:H03 |
| ES 86 | M00057233A:F07 | ES 111 | M00042742C:A06 |
| ES 86 | M00057233B:E04 | ES 111 | M00042742D:D05 |
| ES 86 | M00057236B:H06 | ES 111 | M00042746B:F02 |
| ES 86 | M00057237A:B11 | ES 111 | M00042746D:B09 |
| ES 86 | M00057239A:G08 | ES 111 | M00042750D:B09 |
| ES 86 | M00057241B:B04 | ES 111 | M00042881D:C08 |
| ES 86 | M00057242B:F07 | ES 111 | M00042883A:F12 |
| ES 87 | M00057242D:B09 | ES 111 | M00042886C:C03 |
| ES 87 | M00057242D:H05 | ES 111 | M00042886C:F01 |
| ES 87 | M00057249A:C06 | ES 111 | M00042887C:D07 |
| ES 87 | M00057259A:H10 | ES 111 | M00042889B:A09 |
| ES 87 | M00057259B:B08 | ES 111 | M00042890D:C08 |
| ES 87 | M00057266C:D04 | ES 111 | M00042891B:C04 |
| ES 87 | M00057266C:G12 | ES 111 | M00042893B:C08 |
| ES 87 | M00057268C:E10 | ES 111 | M00042900C:C07 |
| ES 87 | M00057270B:H09 | ES 111 | M00042901B:A03 |
| ES 87 | M00057270C:E04 | ES 111 | M00042902A:C04 |
| ES 87 | M00057271C:E01 | ES 111 | M00042905A:F11 |
| ES 87 | M00057272A:B03 | ES 111 | M00042905C:C10 |
| ES 87 | M00057272C:H04 | ES 111 | M00042908D:G01 |
| ES 87 | M00057272D:A01 | ES 111 | M00042909B:G04 |
| ES 87 | M00057275B:A12 | ES 111 | M00042911A:H03 |
| ES 87 | M00057277B:C09 | ES 111 | M00042914D:B10 |
| ES 87 | M00057277B:E10 | ES 111 | M00054792D:E09 |
| ES 87 | M00057279A:G02 | ES 111 | M00054793D:B07 |
| ES 87 | M00057280C:A06 | ES 111 | M00054798D:F01 |
| ES 87 | M00057283A:E06 | ES 111 | M00054913C:G03 |
| ES 87 | M00057288D:E08 | ES 111 | M00054915D:E07 |
| ES 87 | M00057291C:B06 | ES 111 | M00054917B:F09 |
| ES 87 | M00057297A:F03 | ES 111 | M00054917D:D12 |
| ES 87 | M00057300B:F02 | ES 111 | M00054918C:D03 |
| ES 87 | M00057301B:H12 | ES 112 | M00054918D:C11 |
| ES 87 | M00057304A:E01 | ES 112 | M00055426B:B02 |
| ES 87 | M00057306B:H07 | ES 112 | M00055426C:H06 |
| ES 87 | M00057312B:E11 | ES 112 | M00055427A:F01 |
| ES 87 | M00057318B:B09 | ES 112 | M00055428C:A02 |
| ES 87 | M00057318C:A03 | ES 112 | M00055429A:H05 |
| ES 87 | M00057324A:D12 | ES 112 | M00055430B:H02 |
| ES 87 | M00057325C:C10 | ES 112 | M00055431C:E09 |
| ES 87 | M00057333A:F09 | ES 112 | M00055438C:C06 |
| ES 87 | M00057334B:F01 | ES 112 | M00055438C:H10 |
| ES 87 | M00057337B:G02 | ES 112 | M00055441B:D02 |
| ES 87 | M00057340B:C12 | ES 112 | M00055445D:G06 |
| ES 87 | M00042355A:G02 | ES 112 | M00055446C:B06 |
| ES 87 | M00042355D:C01 | ES 112 | M00055447D:H04 |
| ES 87 | M00042442D:A02 | ES 112 | M00055447D:H04 |
| ES 87 | M00042444D:G05 | ES 112 | M00055448A:D08 |
| ES 87 | M00042444D:H08 | ES 112 | M00055448C:E07 |
| ES 87 | M00042450D:H10 | ES 112 | M00055450A:G09 |
| ES 87 | M00042453C:E01 | ES 112 | M00055450D:B08 |
| ES 87 | M00042460D:A07 | ES 112 | M00055451A:F07 |
| ES 87 | M00042517C:F07 | ES 112 | M00055451A:F11 |
| ES 87 | M00042518D:A06 | ES 112 | M00055451C:G11 |
| ES 87 | M00042520A:F04 | ES 112 | M00055453C:E01 |
| ES 88 | M00042520A:F09 | ES 112 | M00055453C:E01 |
| ES 88 | M00042520A:F09 | ES 112 | M00055454A:A07 |
| ES 88 | M00043296C:B10 | ES 112 | M00055454A:H11 |
| ES 88 | M00043300A:H11 | ES 112 | M00055454C:G05 |
| ES 88 | M00043301A:F06 | ES 112 | M00055456D:F12 |
| ES 88 | M00043301D:H09 | ES 112 | M00055463D:H10 |
| ES 88 | M00043304A:D01 | ES 112 | M00055464A:F05 |
| ES 88 | M00043304B:C05 | ES 112 | M00055466D:B08 |
| ES 88 | M00043304B:C05 | ES 112 | M00055470B:G01 |
| ES 88 | M00043306D:B07 | ES 112 | M00055491A:G08 |
| ES 88 | M00043309B:H07 | ES 112 | M00055494D:C09 |
| ES 88 | M00043310C:B03 | ES 112 | M00055495A:G02 |
| ES 88 | M00043313A:A03 | ES 112 | M00055495C:D05 |
| ES 88 | M00043313A:G07 | ES 112 | M00055495C:F03 |
| ES 88 | M00043313D:C06 | ES 112 | M00055495D:E02 |
| ES 88 | M00043314C:H04 | ES 112 | M00055496A:F09 |
| ES 88 | M00043317A:H01 | ES 112 | M00055496B:E07 |
| ES 88 | M00043317C:F04 | ES 112 | M00055496C:C09 |
| ES 88 | M00043323C:D04 | ES 112 | M00055498A:H09 |
| ES 88 | M00043324D:D04 | ES 112 | M00055500D:B05 |
| ES 88 | M00043327D:H02 | ES 112 | M00055504C:D08 |
| ES 88 | M00043327D:H02 | ES 112 | M00055505D:A10 |
| ES 88 | M00043336B:E08 | ES 112 | M00055508D:E03 |
| ES 88 | M00043338A:B03 | ES 112 | M00055509C:H09 |
| ES 88 | M00043338B:A03 | ES 112 | M00055510B:B07 |
| ES 88 | M00043345B:C03 | ES 113 | M00055511D:E09 |
| ES 88 | M00043347B:G12 | ES 113 | M00055512C:G06 |
| ES 88 | M00043349A:C08 | ES 113 | M00055512D:D07 |
| ES 88 | M00043350B:H06 | ES 113 | M00055512D:F08 |
| ES 88 | M00043350C:H09 | ES 113 | M00055513C:D06 |
| ES 88 | M00043352A:E09 | ES 113 | M00055514D:H05 |
| ES 88 | M00043352D:B05 | ES 113 | M00055516B:E08 |
| ES 88 | M00043354D:C01 | ES 113 | M00055517B:D03 |
| ES 88 | M00043355D:H11 | ES 113 | M00055519B:C06 |
| ES 88 | M00043361D:D05 | ES 113 | M00055519C:H07 |
| ES 88 | M00043365A:C06 | ES 113 | M00055520C:A06 |
| ES 88 | M00043374A:B02 | ES 113 | M00055522A:E07 |
| ES 88 | M00043374B:B06 | ES 113 | M00055522D:C02 |
| ES 88 | M00043377A:C03 | ES 113 | M00055522D:C02 |
| ES 88 | M00043379D:C07 | ES 113 | M00055523D:C03 |
| ES 88 | M00043381B:E10 | ES 113 | M00055525C:B07 |
| ES 88 | M00043386D:A06 | ES 113 | M00055526D:F09 |
| ES 88 | M00043388D:C09 | ES 113 | M00055527C:E02 |
| ES 88 | M00043394D:B06 | ES 113 | M00055527C:E04 |
| ES 88 | M00043397B:B02 | ES 113 | M00055527D:G11 |
| ES 88 | M00043397C:B09 | ES 113 | M00055528C:F06 |
| ES 88 | M00043503C:C08 | ES 113 | M00055529D:B02 |
| ES 88 | M00043503C:E05 | ES 113 | M00055530D:B07 |
| ES 89 | M00043504C:G06 | ES 113 | M00055532C:G08 |
| ES 89 | M00043504D:G08 | ES 113 | M00055534C:H01 |
| ES 89 | M00043506A:H09 | ES 113 | M00055536C:E06 |
| ES 89 | M00043507A:D05 | ES 113 | M00055536C:F03 |
| ES 89 | M00043508A:A08 | ES 113 | M00055538B:H11 |
| ES 89 | M00043508D:C01 | ES 113 | M00055542C:C01 |
| ES 89 | M00054486A:B11 | ES 113 | M00055542C:F06 |
| ES 89 | M00054493A:A10 | ES 113 | M00055542D:A09 |
| ES 89 | M00054494A:E01 | ES 113 | M00055543A:C05 |
| ES 89 | M00054496A:B09 | ES 113 | M00055543A:C05 |
| ES 89 | M00054499B:E11 | ES 113 | M00055543C:G08 |
| ES 89 | M00054499B:E11 | ES 113 | M00055544A:E04 |
| ES 89 | M00054502A:D01 | ES 113 | M00055544B:B02 |
| ES 89 | M00054502C:E02 | ES 113 | M00055545C:H12 |
| ES 89 | M00054507A:C11 | ES 113 | M00055547D:D10 |
| ES 89 | M00054510D:H09 | ES 113 | M00055547D:E05 |
| ES 89 | M00054513A:A12 | ES 113 | M00055548A:F04 |
| ES 89 | M00054518D:D03 | ES 113 | M00055548C:E12 |
| ES 89 | M00054520C:B05 | ES 113 | M00055548C:E12 |
| ES 89 | M00054521D:F04 | ES 113 | M00055552A:C09 |
| ES 89 | M00054522B:H11 | ES 113 | M00055553B:H04 |
| ES 89 | M00054523D:A10 | ES 113 | M00055553D:C07 |
| ES 89 | M00054524D:B02 | ES 113 | M00055553D:H02 |
| ES 89 | M00054534D:D02 | ES 113 | M00055556C:H09 |
| ES 89 | M00054535C:H09 | ES 113 | M00055560B:B12 |
| ES 89 | M00054542C:A08 | ES 114 | M00055560B:F02 |
| ES 89 | M00054551C:G03 | ES 114 | M00055560C:F06 |
| ES 89 | M00054555C:G12 | ES 114 | M00055563A:A02 |
| ES 89 | M00054561D:E06 | ES 114 | M00055572A:B12 |
| ES 89 | M00054563B:C09 | ES 114 | M00055572C:F03 |
| ES 89 | M00054568A:G11 | ES 114 | M00055575A:D08 |
| ES 89 | M00054569A:H07 | ES 114 | M00055578A:H09 |
| ES 89 | M00054571C:C01 | ES 114 | M00055581D:B01 |
| ES 89 | M00054572B:C01 | ES 114 | M00055582B:E04 |
| ES 89 | M00054575C:C01 | ES 114 | M00055583B:B04 |
| ES 89 | M00054580C:D11 | ES 114 | M00055583B:H05 |
| ES 89 | M00054583A:F05 | ES 114 | M00055584A:C11 |
| ES 89 | M00054587A:F09 | ES 114 | M00055584D:G06 |
| ES 89 | M00054590C:G02 | ES 114 | M00055586C:F05 |
| ES 89 | M00054591C:H07 | ES 114 | M00055586D:F02 |
| ES 89 | M00054595A:B02 | ES 114 | M00055591C:H01 |
| ES 89 | M00054595B:H09 | ES 114 | M00055592D:A05 |
| ES 89 | M00054596B:B07 | ES 114 | M00055594B:A01 |
| ES 89 | M00054600D:G07 | ES 114 | M00055597C:E08 |
| ES 89 | M00054601A:H10 | ES 114 | M00055601C:D09 |
| ES 89 | M00054601D:E08 | ES 114 | M00055602B:G10 |
| ES 89 | M00054602A:C04 | ES 114 | M00055602C:E07 |
| ES 90 | M00054602B:D02 | ES 114 | M00055609A:G03 |
| ES 90 | M00054604A:D09 | ES 114 | M00055609D:F12 |
| ES 90 | M00054604A:D09 | ES 114 | M00055613A:D10 |
| ES 90 | M00054605C:D01 | ES 114 | M00055613A:E02 |
| ES 90 | M00054609A:F01 | ES 114 | M00055618C:A06 |
| ES 90 | M00054609D:H06 | ES 114 | M00055628A:A08 |
| ES 90 | M00054611C:F02 | ES 114 | M00055630B:E09 |
| ES 90 | M00054613A:D09 | ES 114 | M00055633D:A02 |
| ES 90 | M00054613A:D09 | ES 114 | M00055633D:G11 |
| ES 90 | M00054617B:A09 | ES 114 | M00055635A:H10 |
| ES 90 | M00054621B:C06 | ES 114 | M00055635B:E10 |
| ES 90 | M00054621D:D11 | ES 114 | M00055635C:G04 |
| ES 90 | M00054629C:E09 | ES 114 | M00055636A:F10 |
| ES 90 | M00054636B:B03 | ES 114 | M00055647C:B04 |
| ES 90 | M00054636C:A02 | ES 114 | M00055653A:H04 |
| ES 90 | M00054636C:F02 | ES 114 | M00055656A:E09 |
| ES 90 | M00054638A:D09 | ES 114 | M00055662C:A04 |
| ES 90 | M00054638B:C08 | ES 114 | M00055664C:A08 |
| ES 90 | M00054646C:B01 | ES 114 | M00055668B:B07 |
| ES 90 | M00054647D:H02 | ES 114 | M00055679A:A07 |
| ES 90 | M00054648C:H10 | ES 114 | M00055681B:G02 |
| ES 90 | M00054660D:F05 | ES 114 | M00055685D:E01 |
| ES 90 | M00054665B:H08 | ES 114 | M00055686D:E11 |
| ES 90 | M00054665D:E11 | ES 114 | M00055687C:F01 |
| ES 90 | M00054677C:D02 | ES 114 | M00055688C:B04 |
| ES 90 | M00054678A:E07 | ES 114 | M00055689A:G12 |
| ES 90 | M00054679B:D12 | ES 115 | M00055689D:F02 |
| ES 90 | M00054680B:E06 | ES 115 | M00055689D:F07 |
| ES 90 | M00054680D:B11 | ES 115 | M00055691B:E07 |
| ES 90 | M00054681C:B02 | ES 115 | M00055692D:E07 |
| ES 90 | M00054684C:H12 | ES 115 | M00055701C:D10 |
| ES 90 | M00054689D:E12 | ES 115 | M00055703A:B08 |
| ES 90 | M00054691A:E05 | ES 115 | M00055703B:B06 |
| ES 90 | M00054692B:D01 | ES 115 | M00055703B:C05 |
| ES 90 | M00054694D:G04 | ES 115 | M00055703C:G09 |
| ES 90 | M00054706B:C09 | ES 115 | M00055704C:D07 |
| ES 90 | M00054707B:B08 | ES 115 | M00055705C:G07 |
| ES 90 | M00054707B:E05 | ES 115 | M00055706A:A01 |
| ES 90 | M00054713A:D12 | ES 115 | M00055706B:G01 |
| ES 90 | M00054720D:D12 | ES 115 | M00055707D:C08 |
| ES 90 | M00054720D:F11 | ES 115 | M00055709B:G09 |
| ES 90 | M00054721C:F11 | ES 115 | M00055716C:B04 |
| ES 90 | M00054722C:D01 | ES 115 | M00055717B:F04 |
| ES 90 | M00054722D:C08 | ES 115 | M00055718A:F05 |
| ES 90 | M00054726A:F08 | ES 115 | M00055720B:G09 |
| ES 90 | M00054727D:E10 | ES 115 | M00055720C:A06 |
| ES 90 | M00054727D:H06 | ES 115 | M00055720D:A01 |
| ES 90 | M00054728B:E08 | ES 115 | M00055721B:F06 |
| ES 91 | M00054728D:B10 | ES 115 | M00055721B:F06 |
| ES 91 | M00054729A:E01 | ES 115 | M00055721C:E05 |
| ES 91 | M00054731C:C12 | ES 115 | M00055723A:B08 |
| ES 91 | M00054732D:E03 | ES 115 | M00055723D:E05 |
| ES 91 | M00054734D:H10 | ES 115 | M00055724D:D09 |
| ES 91 | M00054739A:G03 | ES 115 | M00055726B:B08 |
| ES 91 | M00054739C:D03 | ES 115 | M00055726C:D12 |
| ES 91 | M00054739C:E06 | ES 115 | M00055726C:G10 |
| ES 91 | M00054740A:H08 | ES 115 | M00055729D:A06 |
| ES 91 | M00054741A:C10 | ES 115 | M00055731A:H12 |
| ES 91 | M00054741A:E10 | ES 115 | M00055733A:G11 |
| ES 91 | M00054741D:G10 | ES 115 | M00055734C:H05 |
| ES 91 | M00054743C:E02 | ES 115 | M00055735C:C07 |
| ES 91 | M00054745D:A03 | ES 115 | M00055735C:G05 |
| ES 91 | M00054747A:F01 | ES 115 | M00055736A:D06 |
| ES 91 | M00054747D:C06 | ES 115 | M00055736B:G03 |
| ES 91 | M00054750C:D12 | ES 115 | M00055736C:G07 |
| ES 91 | M00054752B:A07 | ES 115 | M00055740B:B12 |
| ES 91 | M00054755B:H06 | ES 115 | M00055740B:F09 |
| ES 91 | M00054759A:B08 | ES 115 | M00055743B:C12 |
| ES 91 | M00054760A:A12 | ES 115 | M00055744B:C08 |
| ES 91 | M00054762B:F07 | ES 115 | M00055744C:F08 |
| ES 91 | M00054765B:C05 | ES 115 | M00055744C:F09 |
| ES 91 | M00054766C:B04 | ES 115 | M00055744D:G08 |
| ES 91 | M00054769A:F07 | ES 115 | M00055747C:D09 |
| ES 91 | M00054772C:C06 | ES 115 | M00055749D:H11 |
| ES 91 | M00054773A:A12 | ES 116 | M00055751C:D01 |
| ES 91 | M00054776B:F01 | ES 116 | M00055755C:D02 |
| ES 91 | M00054779A:F07 | ES 116 | M00055755D:H03 |
| ES 91 | M00054780C:G08 | ES 116 | M00055761D:C03 |
| ES 91 | M00054781B:B04 | ES 116 | M00055763B:E06 |
| ES 91 | M00054802A:G02 | ES 116 | M00055765A:B05 |
| ES 91 | M00054804D:H12 | ES 116 | M00055766A:H03 |
| ES 91 | M00054808A:D07 | ES 116 | M00055768A:B05 |
| ES 91 | M00054808B:F08 | ES 116 | M00055770C:G01 |
| ES 91 | M00054810B:H02 | ES 116 | M00055771A:A11 |
| ES 91 | M00054812B:A05 | ES 116 | M00055771A:D01 |
| ES 91 | M00054812D:C07 | ES 116 | M00055771C:A11 |
| ES 91 | M00054812D:C07 | ES 116 | M00055771C:F05 |
| ES 91 | M00054815C:E01 | ES 116 | M00055771D:D04 |
| ES 91 | M00054816C:D11 | ES 116 | M00055771D:F07 |
| ES 91 | M00054821A:C11 | ES 116 | M00055774C:E01 |
| ES 91 | M00054823D:H07 | ES 116 | M00055774D:G03 |
| ES 91 | M00054826B:C10 | ES 116 | M00055775C:B10 |
| ES 91 | M00054826B:E05 | ES 116 | M00055775D:C06 |
| ES 91 | M00054826D:C10 | ES 116 | M00055778A:F09 |
| ES 91 | M00054827B:H01 | ES 116 | M00055779B:A02 |
| ES 92 | M00054832D:E09 | ES 116 | M00055780B:B07 |
| ES 92 | M00054836A:B05 | ES 116 | M00055780D:G08 |
| ES 92 | M00054839B:B02 | ES 116 | M00055781C:C05 |
| ES 92 | M00054839C:F06 | ES 116 | M00055782A:F02 |
| ES 92 | M00054841D:B07 | ES 116 | M00055783A:C11 |
| ES 92 | M00054841D:B07 | ES 116 | M00055785B:F03 |
| ES 92 | M00054842D:C11 | ES 116 | M00055785C:E08 |
| ES 92 | M00054844D:F06 | ES 116 | M00055786A:D05 |
| ES 92 | M00054849D:H11 | ES 116 | M00055788D:A03 |
| ES 92 | M00054851B:E03 | ES 116 | M00055790C:H02 |
| ES 92 | M00054854D:E08 | ES 116 | M00055791A:D05 |
| ES 92 | M00054856D:A02 | ES 116 | M00055791D:F03 |
| ES 92 | M00054857D:E12 | ES 116 | M00055792B:G09 |
| ES 92 | M00054862B:B07 | ES 116 | M00055792D:E07 |
| ES 92 | M00054863B:G03 | ES 116 | M00055794A:G11 |
| ES 92 | M00054865B:H04 | ES 116 | M00055794C:B06 |
| ES 92 | M00054866C:G07 | ES 116 | M00055796D:E10 |
| ES 92 | M00054867A:C07 | ES 116 | M00055797A:D08 |
| ES 92 | M00054867B:B02 | ES 116 | M00055797B:E07 |
| ES 92 | M00054867C:B07 | ES 116 | M00055798B:C06 |
| ES 92 | M00054869C:D01 | ES 116 | M00055800A:D08 |
| ES 92 | M00054870B:D09 | ES 116 | M00055800B:C08 |
| ES 92 | M00054875B:C04 | ES 116 | M00055802A:D08 |
| ES 92 | M00054876B:G03 | ES 116 | M00055802A:G02 |
| ES 92 | M00054877A:H12 | ES 116 | M00055802B:H04 |
| ES 92 | M00054895B:D09 | ES 116 | M00055802C:F12 |
| ES 92 | M00054899D:F07 | ES 116 | M00055803B:A11 |
| ES 92 | M00054899D:G01 | ES 117 | M00055803C:D08 |
| ES 92 | M00054903D:C12 | ES 117 | M00055804A:F03 |
| ES 92 | M00054908B:F07 | ES 117 | M00055804B:F01 |
| ES 92 | M00054910D:G06 | ES 117 | M00055805B:C07 |
| ES 92 | M00054926D:F01 | ES 117 | M00055805C:D10 |
| ES 92 | M00054927B:E08 | ES 117 | M00055806A:H12 |
| ES 92 | M00054931C:A09 | ES 117 | M00055806B:F07 |
| ES 92 | M00054933A:D07 | ES 117 | M00055806C:E09 |
| ES 92 | M00054934C:D03 | ES 117 | M00055807B:G10 |
| ES 92 | M00054935A:E01 | ES 117 | M00055807B:G10 |
| ES 92 | M00054935A:G04 | ES 117 | M00055807D:C04 |
| ES 92 | M00054937A:B03 | ES 117 | M00055808C:G11 |
| ES 92 | M00054937B:A12 | ES 117 | M00055811A:A08 |
| ES 92 | M00054937B:F03 | ES 117 | M00055811D:C12 |
| ES 92 | M00054937C:B10 | ES 117 | M00055812A:E01 |
| ES 92 | M00054941C:G04 | ES 117 | M00055814C:D11 |
| ES 92 | M00054943C:C04 | ES 117 | M00055816B:F01 |
| ES 92 | M00054943D:C03 | ES 117 | M00055817B:F01 |
| ES 92 | M00054945C:G07 | ES 117 | M00055817C:C08 |
| ES 92 | M00054947B:G12 | ES 117 | M00055817C:D08 |
| ES 92 | M00054949A:E03 | ES 117 | M00055818A:F12 |
| ES 93 | M00054949C:A07 | ES 117 | M00055818D:E10 |
| ES 93 | M00054950D:G06 | ES 117 | M00055820A:E08 |
| ES 93 | M00054952A:F01 | ES 117 | M00055820B:E05 |
| ES 93 | M00054952C:H06 | ES 117 | M00055820C:C08 |
| ES 93 | M00054953D:G10 | ES 117 | M00055820D:G10 |
| ES 93 | M00054954B:C03 | ES 117 | M00055821A:A06 |
| ES 93 | M00054954D:F01 | ES 117 | M00055821A:G12 |
| ES 93 | M00054957A:B02 | ES 117 | M00055822B:H04 |
| ES 93 | M00054959C:C11 | ES 117 | M00055823B:D03 |
| ES 93 | M00054963C:H11 | ES 117 | M00055823C:D11 |
| ES 93 | M00054963D:H04 | ES 117 | M00055825B:E03 |
| ES 93 | M00054964A:H11 | ES 117 | M00055826A:F04 |
| ES 93 | M00054965B:H02 | ES 117 | M00055827B:D02 |
| ES 93 | M00054970D:G03 | ES 117 | M00055827D:A02 |
| ES 93 | M00054973B:A10 | ES 117 | M00055827D:C06 |
| ES 93 | M00054975C:C04 | ES 117 | M00055827D:E08 |
| ES 93 | M00054980D:C02 | ES 117 | M00055829C:G09 |
| ES 93 | M00054981C:E11 | ES 117 | M00055830A:G10 |
| ES 93 | M00054981D:C06 | ES 117 | M00055832D:E12 |
| ES 93 | M00054984D:B12 | ES 117 | M00055833D:A11 |
| ES 93 | M00054984D:C07 | ES 117 | M00055838B:D12 |
| ES 93 | M00054985C:F07 | ES 117 | M00055838B:G12 |
| ES 93 | M00054987D:C02 | ES 117 | M00055839A:F09 |
| ES 93 | M00054988C:G02 | ES 117 | M00055839B:A10 |
| ES 93 | M00054995A:C10 | ES 117 | M00055840C:D06 |
| ES 93 | M00054996C:B11 | ES 117 | M00055841A:B09 |
| ES 93 | M00054996C:C09 | ES 117 | M00055841C:D05 |
| ES 93 | M00054997C:B12 | ES 118 | M00055848C:H06 |
| ES 93 | M00054997C:H03 | ES 118 | M00055849C:D08 |
| ES 93 | M00055000C:F04 | ES 118 | M00055850B:F03 |
| ES 93 | M00055002D:E04 | ES 118 | M00055851A:G11 |
| ES 93 | M00055005B:H11 | ES 118 | M00055851C:F12 |
| ES 93 | M00055005D:B08 | ES 118 | M00055851C:F12 |
| ES 93 | M00055008A:B08 | ES 118 | M00055852A:A07 |
| ES 93 | M00055008D:B09 | ES 118 | M00055854A:E04 |
| ES 93 | M00055011C:E04 | ES 118 | M00055856A:F04 |
| ES 93 | M00055017A:A11 | ES 118 | M00055856C:F07 |
| ES 93 | M00055021D:D11 | ES 118 | M00055860D:A08 |
| ES 93 | M00055022A:H04 | ES 118 | M00055861A:D03 |
| ES 93 | M00055027B:D07 | ES 118 | M00055864A:E11 |
| ES 93 | M00055027D:F08 | ES 118 | M00055864A:H02 |
| ES 93 | M00055032D:A06 | ES 118 | M00055866D:A02 |
| ES 93 | M00055034C:G01 | ES 118 | M00055868A:F06 |
| ES 93 | M00055034D:H01 | ES 118 | M00055868D:D03 |
| ES 93 | M00055037A:E10 | ES 118 | M00055868D:F09 |
| ES 93 | M00055039A:G01 | ES 118 | M00055869B:A06 |
| ES 93 | M00055039C:E02 | ES 118 | M00055871A:F05 |
| ES 93 | M00055041A:E02 | ES 118 | M00055871D:G06 |
| ES 94 | M00055042A:B01 | ES 118 | M00055872D:D12 |
| ES 94 | M00055046B:C07 | ES 118 | M00055873A:B11 |
| ES 94 | M00055046C:E11 | ES 118 | M00055873B:E03 |
| ES 94 | M00055050C:G04 | ES 118 | M00055874B:B06 |
| ES 94 | M00055053C:B03 | ES 118 | M00055874D:D03 |
| ES 94 | M00055054A:C02 | ES 118 | M00055879B:E11 |
| ES 94 | M00055056D:B06 | ES 118 | M00055879C:D04 |
| ES 94 | M00055057A:F03 | ES 118 | M00055880D:F12 |
| ES 94 | M00055063D:G01 | ES 118 | M00055882C:A06 |
| ES 94 | M00055064A:E12 | ES 118 | M00055882C:A09 |
| ES 94 | M00055071B:A02 | ES 118 | M00055884A:E10 |
| ES 94 | M00055073C:H12 | ES 118 | M00055884C:B01 |
| ES 94 | M00055075B:H05 | ES 118 | M00055884D:A05 |
| ES 94 | M00055077C:F11 | ES 118 | M00055886D:G09 |
| ES 94 | M00055085A:A10 | ES 118 | M00055887A:C06 |
| ES 94 | M00055087A:A10 | ES 118 | M00055887A:F07 |
| ES 94 | M00055088A:A12 | ES 118 | M00055887B:E04 |
| ES 94 | M00055088C:E09 | ES 118 | M00055888B:B05 |
| ES 94 | M00055093B:H05 | ES 118 | M00055889C:H12 |
| ES 94 | M00055094B:H09 | ES 118 | M00055891B:A04 |
| ES 94 | M00055097A:G06 | ES 118 | M00055893B:C05 |
| ES 94 | M00055100B:D08 | ES 118 | M00055896C:F11 |
| ES 94 | M00055104C:B12 | ES 118 | M00055900B:B05 |
| ES 94 | M00055106A:D07 | ES 118 | M00055906B:D10 |
| ES 94 | M00055111B:D03 | ES 118 | M00055906C:F12 |
| ES 94 | M00055112A:C03 | ES 118 | M00055908B:H11 |
| ES 94 | M00055113B:A11 | ES 118 | M00055908C:E12 |
| ES 94 | M00055114D:A11 | ES 122 | M00056209B:F12 |
| ES 94 | M00055115A:E05 | ES 122 | M00056210B:E03 |
| ES 94 | M00055116B:B02 | ES 122 | M00056212C:G01 |
| ES 94 | M00055117C:C03 | ES 122 | M00056213A:A04 |
| ES 94 | M00055121D:C07 | ES 122 | M00056215A:E03 |
| ES 94 | M00055125B:E06 | ES 122 | M00056218C:G03 |
| ES 94 | M00055125B:F01 | ES 122 | M00056220D:D02 |
| ES 94 | M00055128D:B10 | ES 122 | M00056220D:D09 |
| ES 94 | M00055130D:G01 | ES 122 | M00056221D:E05 |
| ES 94 | M00055131C:B10 | ES 122 | M00056222C:F02 |
| ES 94 | M00055134B:E03 | ES 122 | M00056223B:G03 |
| ES 94 | M00055134B:H02 | ES 122 | M00056224C:B10 |
| ES 94 | M00055134D:B03 | ES 122 | M00056224D:E08 |
| ES 94 | M00055137C:C04 | ES 122 | M00056225D:G09 |
| ES 94 | M00055145A:F07 | ES 122 | M00056226C:F12 |
| ES 94 | M00055148D:D11 | ES 122 | M00056228B:A07 |
| ES 94 | M00055154C:F04 | ES 122 | M00056231B:G09 |
| ES 94 | M00055157A:C11 | ES 122 | M00056231B:G09 |
| ES 94 | M00055161D:A11 | ES 122 | M00056232C:E06 |
| ES 94 | M00055162A:F06 | ES 122 | M00056232D:G12 |
| ES 94 | M00055163A:C02 | ES 122 | M00056233D:F03 |
| ES 95 | M00055170A:F01 | ES 122 | M00056236D:G01 |
| ES 95 | M00055170D:E02 | ES 122 | M00056238B:E07 |
| ES 95 | M00055172D:D04 | ES 122 | M00056243C:G10 |
| ES 95 | M00055179C:D02 | ES 122 | M00056244A:B08 |
| ES 95 | M00055181A:E01 | ES 122 | M00056244B:C07 |
| ES 95 | M00055182B:C07 | ES 122 | M00056246A:B03 |
| ES 95 | M00055185C:B01 | ES 122 | M00056246C:G07 |
| ES 95 | M00055194D:C05 | ES 122 | M00056247A:G06 |
| ES 95 | M00055196B:A09 | ES 122 | M00056248A:A09 |
| ES 95 | M00055198D:F07 | ES 122 | M00056250B:F01 |
| ES 95 | M00055198D:G07 | ES 122 | M00056251C:A06 |
| ES 95 | M00055201D:A03 | ES 122 | M00056252B:H08 |
| ES 95 | M00055201D:B07 | ES 122 | M00056252D:E11 |
| ES 95 | M00055203B:H02 | ES 122 | M00056253A:F12 |
| ES 95 | M00055206A:H04 | ES 122 | M00056253D:H06 |
| ES 95 | M00055207D:A04 | ES 122 | M00056254A:H02 |
| ES 95 | M00055209D:A08 | ES 122 | M00056256C:H11 |
| ES 95 | M00055209D:D10 | ES 122 | M00056262B:B08 |
| ES 95 | M00055216A:A03 | ES 122 | M00056263D:C01 |
| ES 95 | M00055216A:A03 | ES 122 | M00056267A:E02 |
| ES 95 | M00055222D:H05 | ES 122 | M00056267C:B02 |
| ES 95 | M00055227A:H09 | ES 122 | M00056268B:B04 |
| ES 95 | M00055227D:E02 | ES 122 | M00056268C:D01 |
| ES 95 | M00055227D:E07 | ES 122 | M00056273B:A01 |
| ES 95 | M00055231A:D10 | ES 122 | M00056281D:E04 |
| ES 95 | M00055242A:E06 | ES 122 | M00056282A:F11 |
| ES 95 | M00055242B:A01 | ES 122 | M00056282B:D04 |
| ES 95 | M00055242D:D04 | ES 123 | M00056282D:C01 |
| ES 95 | M00055243A:F04 | ES 123 | M00056282D:H09 |
| ES 95 | M00055243A:G01 | ES 123 | M00056283A:E02 |
| ES 95 | M00055245B:A09 | ES 123 | M00056283A:E02 |
| ES 95 | M00055247B:A11 | ES 123 | M00056283D:C03 |
| ES 95 | M00055252A:C02 | ES 123 | M00056286A:E08 |
| ES 95 | M00055259D:F04 | ES 123 | M00056286D:A12 |
| ES 95 | M00055260B:A05 | ES 123 | M00056290B:F05 |
| ES 95 | M00055260C:F12 | ES 123 | M00056290D:E08 |
| ES 95 | M00055262C:B11 | ES 123 | M00056290D:H02 |
| ES 95 | M00055263A:G09 | ES 123 | M00056291B:G01 |
| ES 95 | M00055271D:C05 | ES 123 | M00056291D:B05 |
| ES 95 | M00055273B:C05 | ES 123 | M00056292B:E05 |
| ES 95 | M00055274C:F02 | ES 123 | M00056293B:E08 |
| ES 95 | M00055279B:G08 | ES 123 | M00056293C:F05 |
| ES 95 | M00055279C:E12 | ES 123 | M00056293C:G09 |
| ES 95 | M00055283B:F05 | ES 123 | M00056295A:F07 |
| ES 95 | M00055283C:H02 | ES 123 | M00056295C:D06 |
| ES 95 | M00055289B:D02 | ES 123 | M00056300A:A05 |
| ES 95 | M00055294B:D04 | ES 123 | M00056302B:F12 |
| ES 96 | M00055302D:F02 | ES 123 | M00056303A:C03 |
| ES 96 | M00055306A:G09 | ES 123 | M00056303C:B04 |
| ES 96 | M00055319B:A01 | ES 123 | M00056304D:G11 |
| ES 96 | M00055322B:E01 | ES 123 | M00056307A:H12 |
| ES 96 | M00055324C:H10 | ES 123 | M00056310B:G06 |
| ES 96 | M00055325C:B12 | ES 123 | M00056312B:A04 |
| ES 96 | M00055327D:H08 | ES 123 | M00056312D:C03 |
| ES 96 | M00055332C:G11 | ES 123 | M00056313C:F07 |
| ES 96 | M00055334C:H09 | ES 123 | M00056319C:G01 |
| ES 96 | M00055335A:H03 | ES 123 | M00056320C:H02 |
| ES 96 | M00055338B:H07 | ES 123 | M00056323A:H10 |
| ES 96 | M00055344C:H09 | ES 123 | M00056323A:H10 |
| ES 96 | M00055345C:H11 | ES 123 | M00056323C:C12 |
| ES 96 | M00055346B:D02 | ES 123 | M00056323D:A07 |
| ES 96 | M00055350A:F01 | ES 123 | M00056324B:D02 |
| ES 96 | M00055356C:C06 | ES 123 | M00056330C:D03 |
| ES 96 | M00055358B:C01 | ES 123 | M00056331B:D01 |
| ES 96 | M00055361D:H01 | ES 123 | M00056338B:B06 |
| ES 96 | M00055363D:G12 | ES 123 | M00056338C:B10 |
| ES 96 | M00055364D:E01 | ES 123 | M00056342A:G05 |
| ES 96 | M00055368B:C10 | ES 123 | M00056342B:G03 |
| ES 96 | M00055368C:B06 | ES 123 | M00056342C:F11 |
| ES 96 | M00055371B:F01 | ES 123 | M00056344A:G03 |
| ES 96 | M00055373D:D10 | ES 123 | M00056345D:E03 |
| ES 96 | M00055374A:A08 | ES 123 | M00056437C:H07 |
| ES 96 | M00055376B:B01 | ES 123 | M00056438C:A06 |
| ES 96 | M00055379D:C08 | ES 123 | M00056447B:A04 |
| ES 96 | M00055381B:E09 | ES 123 | M00056448B:C09 |
| ES 96 | M00055383B:B04 | ES 124 | M00056456C:A09 |
| ES 96 | M00055383B:B04 | ES 124 | M00056456C:F02 |
| ES 96 | M00055384D:A03 | ES 124 | M00056456D:F01 |
| ES 96 | M00055385C:G06 | ES 124 | M00056459A:C07 |
| ES 96 | M00055388A:G08 | ES 124 | M00056459A:C07 |
| ES 96 | M00055388A:H08 | ES 124 | M00056459A:D07 |
| ES 96 | M00055390B:D08 | ES 124 | M00056460A:G11 |
| ES 96 | M00055391A:G08 | ES 124 | M00056466A:A03 |
| ES 96 | M00055391C:G06 | ES 124 | M00056466A:E02 |
| ES 96 | M00055395A:C02 | ES 124 | M00056467C:E07 |
| ES 96 | M00055396A:G07 | ES 124 | M00056475B:C12 |
| ES 96 | M00055404D:C07 | ES 124 | M00056475C:F01 |
| ES 96 | M00055405A:D09 | ES 124 | M00056475C:F02 |
| ES 96 | M00055405B:H05 | ES 124 | M00042432C:H10 |
| ES 96 | M00055405D:G07 | ES 124 | M00042440A:E05 |
| ES 96 | M00055406B:D05 | ES 124 | M00042461A:A10 |
| ES 96 | M00055408B:E09 | ES 124 | M00042463A:F09 |
| ES 96 | M00055408D:F03 | ES 124 | M00042466D:H06 |
| ES 96 | M00055413A:B07 | ES 124 | M00042469D:H04 |
| ES 96 | M00055414C:A11 | ES 124 | M00042511A:A04 |
| ES 97 | M00055415B:H11 | ES 124 | M00042513D:A12 |
| ES 97 | M00055417A:G08 | ES 124 | M00042515C:A10 |
| ES 97 | M00055419D:G01 | ES 124 | M00042756B:B01 |
| ES 97 | M00055420A:E06 | ES 124 | M00042758D:H12 |
| ES 97 | M00055420B:F10 | ES 124 | M00042760B:C07 |
| ES 97 | M00055420D:G04 | ES 124 | M00042764B:B04 |
| ES 97 | M00055421B:D04 | ES 124 | M00042767D:D02 |
| ES 97 | M00055421C:C11 | ES 124 | M00042770B:B12 |
| ES 97 | M00055423A:A10 | ES 124 | M00042771B:A03 |
| ES 97 | M00055423A:G08 | ES 124 | M00042777A:D06 |
| ES 97 | M00055423C:H10 | ES 124 | M00042781C:A06 |
| ES 97 | M00055425D:C05 | ES 124 | M00042783C:A03 |
| ES 97 | M00055472A:F02 | ES 124 | M00042787C:E09 |
| ES 97 | M00055472B:H03 | ES 124 | M00042792C:G10 |
| ES 97 | M00055475D:G08 | ES 124 | M00042792D:F04 |
| ES 97 | M00055479A:G02 | ES 124 | M00042793B:G06 |
| ES 97 | M00055479C:C12 | ES 124 | M00042800A:A03 |
| ES 97 | M00055480C:H10 | ES 124 | M00042801B:B06 |
| ES 97 | M00055482D:A01 | ES 124 | M00042802C:G11 |
| ES 97 | M00055484A:G07 | ES 124 | M00042805A:E06 |
| ES 97 | M00055485A:C09 | ES 124 | M00042805D:H08 |
| ES 97 | M00055487B:F06 | ES 124 | M00042814D:B11 |
| ES 97 | M00001340A:E01 | ES 124 | M00042816B:F04 |
| ES 97 | M00001470C:G01 | ES 124 | M00042818A:E12 |
| ES 97 | M00001470C:G01 | ES 124 | M00042823B:G04 |
| ES 97 | M00001491B:C08 | ES 124 | M00042826B:C05 |
| ES 97 | M00001537D:F10 | ES 124 | M00042826D:C03 |
| ES 97 | M00001537D:F10 | ES 124 | M00042833D:G01 |
| ES 97 | M00001561B:G01 | ES 125 | M00042834C:B06 |
| ES 97 | M00001625A:B08 | ES 125 | M00042835C:C01 |
| ES 97 | M00001637A:D09 | ES 125 | M00042835D:D02 |
| ES 97 | M00003792B:A11 | ES 125 | M00042838D:E11 |
| ES 97 | M00003794C:D07 | ES 125 | M00042842A:C01 |
| ES 97 | M00003804D:A09 | ES 125 | M00042842D:E08 |
| ES 97 | M00003922B:H03 | ES 125 | M00042844C:C12 |
| ES 97 | M00003948A:B12 | ES 125 | M00042846C:D09 |
| ES 97 | M00003986D:G12 | ES 125 | M00042848D:G12 |
| ES 97 | M00003986D:G12 | ES 125 | M00042849D:F11 |
| ES 97 | M00004054C:G05 | ES 125 | M00042850B:C04 |
| ES 97 | M00004066C:D02 | ES 125 | M00042850C:C10 |
| ES 97 | M00004080A:A05 | ES 125 | M00042853A:G03 |
| ES 97 | M00004087D:B11 | ES 125 | M00042853D:A04 |
| ES 97 | M00004093D:C10 | ES 125 | M00042855A:B09 |
| ES 97 | M00004167C:D11 | ES 125 | M00042856C:F07 |
| ES 97 | M00004167C:D11 | ES 125 | M00042864A:E05 |
| ES 97 | M00004198B:A11 | ES 125 | M00042867D:H01 |
| ES 97 | M00004296D:G11 | ES 125 | M00042869C:E06 |
| ES 98 | M00004304A:D07 | ES 125 | M00042875C:E04 |
| ES 98 | M00004842C:B07 | ES 125 | M00042879B:F09 |
| ES 98 | M00004850C:G05 | ES 125 | M00056346C:C12 |
| ES 98 | M00004852D:A04 | ES 125 | M00056351B:D06 |
| ES 98 | M00004868B:D12 | ES 125 | M00056356B:F04 |
| ES 98 | M00004869D:D06 | ES 125 | M00056359C:A11 |
| ES 98 | M00004971B:G04 | ES 125 | M00056362D:G05 |
| ES 98 | M00004972C:E01 | ES 125 | M00056363A:B06 |
| ES 98 | M00005000B:H08 | ES 125 | M00056368C:E04 |
| ES 98 | M00005019D:D02 | ES 125 | M00056369B:D12 |
| ES 98 | M00005293B:D06 | ES 125 | M00056370B:G02 |
| ES 98 | M00005309D:E05 | ES 125 | M00056371B:F12 |
| ES 98 | M00005312A:D10 | ES 125 | M00056372B:C10 |
| ES 98 | M00005313C:B02 | ES 125 | M00056374B:H02 |
| ES 98 | M00005359A:A06 | ES 125 | M00056382C:H02 |
| ES 98 | M00005373D:H06 | ES 125 | M00056383A:C10 |
| ES 98 | M00005385C:A10 | ES 125 | M00056410B:E04 |
| ES 98 | M00005389C:C11 | ES 125 | M00056411C:E04 |
| ES 98 | M00005395A:D09 | ES 125 | M00056414B:A05 |
| ES 98 | M00005406C:A11 | ES 125 | M00056416C:B12 |
| ES 98 | M00005407B:E12 | ES 125 | M00056420C:D07 |
| ES 98 | M00005411C:C07 | ES 125 | M00056421A:F12 |
| ES 98 | M00005413B:F03 | ES 125 | M00056424A:F12 |
| ES 98 | M00005415C:F12 | ES 125 | M00056424B:H06 |
| ES 98 | M00005420B:C01 | ES 125 | M00056424D:A10 |
| ES 98 | M00005438B:A06 | ES 125 | M00056425A:H08 |
| ES 98 | M00005445C:A02 | ES 125 | M00056425D:B03 |
| ES 98 | M00005447C:D01 | ES 125 | M00056434A:C08 |
| ES 98 | M00005449C:E10 | ES 125 | M00056434D:E07 |
| ES 98 | M00005454B:C03 | ES 126 | M00056480B:C12 |
| ES 98 | M00005459B:B01 | ES 126 | M00056480D:A10 |
| ES 98 | M00005469B:A07 | ES 126 | M00056481A:F02 |
| ES 98 | M00005481D:C06 | ES 126 | M00056483D:F06 |
| ES 98 | M00005485B:B05 | ES 126 | M00056484B:G02 |
| ES 98 | M00005485D:A09 | ES 126 | M00056485B:B12 |
| ES 98 | M00005491B:H12 | ES 126 | M00056490D:E02 |
| ES 98 | M00005491D:B03 | ES 126 | M00056491D:G08 |
| ES 98 | M00005500B:E03 | ES 126 | M00056496B:A01 |
| ES 98 | M00005501B:E05 | ES 126 | M00056496C:H09 |
| ES 98 | M00005501D:G09 | ES 126 | M00056499C:F05 |
| ES 98 | M00005513B:F09 | ES 126 | M00056501C:H07 |
| ES 98 | M00005514C:A06 | ES 126 | M00056503B:G11 |
| ES 98 | M00005515B:H04 | ES 126 | M00056503B:G11 |
| ES 98 | M00005516D:H06 | ES 126 | M00056505B:H02 |
| ES 98 | M00005517B:F04 | ES 126 | M00056505D:D07 |
| ES 98 | M00005520C:E12 | ES 126 | M00056506C:G12 |
| ES 98 | M00005530C:A07 | ES 126 | M00056507D:B10 |
| ES 98 | M00005545B:A08 | ES 126 | M00056508B:B10 |
| ES 99 | M00005546A:G02 | ES 126 | M00056511A:H12 |
| ES 99 | M00005548A:A02 | ES 126 | M00056512B:C06 |
| ES 99 | M00005563C:B12 | ES 126 | M00056512C:E09 |
| ES 99 | M00005565A:F05 | ES 126 | M00056512D:C12 |
| ES 99 | M00005568C:B09 | ES 126 | M00056514B:E08 |
| ES 99 | M00007926A:A07 | ES 126 | M00056514C:G01 |
| ES 99 | M00007926D:A05 | ES 126 | M00056515C:C05 |
| ES 99 | M00007927C:C01 | ES 126 | M00056517B:G03 |
| ES 99 | M00007931A:A10 | ES 126 | M00056519C:H01 |
| ES 99 | M00007935D:A05 | ES 126 | M00056526C:E11 |
| ES 99 | M00007936D:B09 | ES 126 | M00056529D:F12 |
| ES 99 | M00007936D:B09 | ES 126 | M00056529D:H09 |
| ES 99 | M00007939B:A03 | ES 126 | M00056530A:D01 |
| ES 99 | M00007943A:C02 | ES 126 | M00056532B:G06 |
| ES 99 | M00007951C:A05 | ES 126 | M00056534A:D11 |
| ES 99 | M00007953B:A01 | ES 126 | M00056537B:H05 |
| ES 99 | M00007953D:H09 | ES 126 | M00056537C:A09 |
| ES 99 | M00007954C:B04 | ES 126 | M00056541B:A08 |
| ES 99 | M00007961B:F05 | ES 126 | M00056547A:C04 |
| ES 99 | M00007964B:G01 | ES 126 | M00056548A:C11 |
| ES 99 | M00007965A:G10 | ES 126 | M00056551A:F02 |
| ES 99 | M00007965B:C03 | ES 126 | M00056552A:A10 |
| ES 99 | M00007965B:C03 | ES 126 | M00056552D:B10 |
| ES 99 | M00007981D:B04 | ES 126 | M00056555A:F09 |
| ES 99 | M00007982A:F11 | ES 126 | M00056556C:G01 |
| ES 99 | M00007983B:D03 | ES 126 | M00056557C:D02 |
| ES 99 | M00007983D:H06 | ES 126 | M00056561C:D08 |
| ES 99 | M00007990D:D03 | ES 126 | M00056564C:E09 |
| ES 99 | M00007991D:G01 | ES 126 | M00056566C:H01 |
| ES 99 | M00007992D:G08 | ES 127 | M00056574B:A07 |
| ES 99 | M00007994A:C11 | ES 127 | M00056580B:F10 |
| ES 99 | M00007994D:A05 | ES 127 | M00056591C:E03 |
| ES 99 | M00007998C:F07 | ES 127 | M00056592A:F04 |
| ES 99 | M00005589C:F07 | ES 127 | M00056592C:C03 |
| ES 99 | M00005610D:B11 | ES 127 | M00056592D:D07 |
| ES 99 | M00005619B:A09 | ES 127 | M00056592D:D07 |
| ES 99 | M00005621A:H08 | ES 127 | M00056593B:E05 |
| ES 99 | M00005627B:B10 | ES 127 | M00056594C:C06 |
| ES 99 | M00005628B:C10 | ES 127 | M00056594C:C10 |
| ES 99 | M00005632A:H02 | ES 127 | M00056595A:A02 |
| ES 99 | M00005650C:A06 | ES 127 | M00056595A:C07 |
| ES 99 | M00005650C:D04 | ES 127 | M00056595B:F02 |
| ES 99 | M00005655B:F08 | ES 127 | M00056596A:E02 |
| ES 99 | M00005675A:G02 | ES 127 | M00056596C:E06 |
| ES 99 | M00005685D:D12 | ES 127 | M00056596C:H08 |
| ES 99 | M00005704C:D10 | ES 127 | M00056597A:F07 |
| ES 99 | M00005708B:B07 | ES 127 | M00056597D:C02 |
| ES 100 | M00042455C:D11 | ES 127 | M00056599D:D11 |
| ES 100 | M00054826A:B05 | ES 127 | M00056600D:H07 |
| ES 100 | M00055281A:E08 | ES 127 | M00056603C:D01 |
| ES 100 | M00005657D:A12 | ES 127 | M00056608C:E04 |
| ES 100 | M00005710A:D01 | ES 127 | M00056610B:H12 |
| ES 100 | M00005765D:F07 | ES 127 | M00056613A:A05 |
| ES 100 | M00005766C:F10 | ES 127 | M00056616B:C08 |
| ES 100 | M00005769B:A03 | ES 127 | M00056616D:A10 |
| ES 100 | M00005782A:B10 | ES 127 | M00056617B:H06 |
| ES 100 | M00005800D:D11 | ES 127 | M00056618A:B02 |
| ES 100 | M00005802B:H10 | ES 127 | M00056618B:F06 |
| ES 100 | M00005810B:F07 | ES 127 | M00056618D:F11 |
| ES 100 | M00005810B:G10 | ES 127 | M00056620D:E12 |
| ES 100 | M00005813B:E10 | ES 127 | M00056622D:C03 |
| ES 100 | M00005818D:B09 | ES 127 | M00056624D:H05 |
| ES 100 | M00005819C:B11 | ES 127 | M00056628C:F01 |
| ES 100 | M00005826D:G10 | ES 127 | M00056631B:G05 |
| ES 100 | M00005830C:D10 | ES 127 | M00056631D:C08 |
| ES 100 | M00006576A:B04 | ES 127 | M00056631D:D03 |
| ES 100 | M00006583B:H03 | ES 127 | M00056633B:B07 |
| ES 100 | M00006587B:A08 | ES 127 | M00056635A:A11 |
| ES 100 | M00006588A:H06 | ES 127 | M00056635A:E09 |
| ES 100 | M00006590A:C10 | ES 127 | M00056638A:D08 |
| ES 100 | M00006610C:D08 | ES 127 | M00056638B:B01 |
| ES 100 | M00006630D:C11 | ES 127 | M00056639A:E02 |
| ES 100 | M00006638A:G02 | ES 127 | M00056643D:G06 |
| ES 100 | M00006641C:H03 | ES 127 | M00056645C:B11 |
| ES 100 | M00006641C:H03 | ES 127 | M00056645D:F06 |
| ES 100 | M00006648B:A05 | ES 127 | M00056646C:C02 |
| ES 100 | M00006649D:B11 | ES 127 | M00056646D:G05 |
| ES 100 | M00006650A:A03 | ES 128 | M00056652D:F04 |
| ES 100 | M00006650D:D05 | ES 128 | M00056656C:H03 |
| ES 100 | M00006664A:B09 | ES 128 | M00056659C:G08 |
| ES 100 | M00006679D:C04 | ES 128 | M00056661B:A09 |
| ES 100 | M00006686B:B07 | ES 128 | M00056661D:E05 |
| ES 100 | M00006695D:H08 | ES 128 | M00056662B:F03 |
| ES 100 | M00006695D:H08 | ES 128 | M00056664B:G06 |
| ES 100 | M00006704C:G06 | ES 128 | M00056664C:B07 |
| ES 100 | M00006705B:A09 | ES 128 | M00056665B:A11 |
| ES 100 | M00006705C:G09 | ES 128 | M00056665C:E05 |
| ES 100 | M00006712C:F02 | ES 128 | M00056666A:C08 |
| ES 100 | M00006719A:E12 | ES 128 | M00056669B:G07 |
| ES 100 | M00006719A:H07 | ES 128 | M00056670A:A11 |
| ES 100 | M00006731B:B02 | ES 128 | M00056673D:E06 |
| ES 100 | M00006731B:C08 | ES 128 | M00056674B:E05 |
| ES 100 | M00006731B:D03 | ES 128 | M00056674D:H04 |
| ES 100 | M00006731C:E01 | ES 128 | M00056682D:F10 |
| ES 100 | M00006734C:A08 | ES 128 | M00056683C:B09 |
| ES 100 | M00006737D:A11 | ES 128 | M00056684D:A05 |
| ES 100 | M00006740B:G01 | ES 128 | M00056684D:F11 |
| ES 100 | M00006745C:A02 | ES 128 | M00056688B:F05 |
| ES 100 | M00006745D:D02 | ES 128 | M00056690C:F09 |
| ES 101 | M00006746C:B06 | ES 128 | M00056693C:C08 |
| ES 101 | M00006746C:B06 | ES 128 | M00056695A:H09 |
| ES 101 | M00006755D:A04 | ES 128 | M00056697C:E03 |
| ES 101 | M00006756B:F08 | ES 128 | M00056698C:E12 |
| ES 101 | M00006761C:C05 | ES 128 | M00056701B:E08 |
| ES 101 | M00006761C:D09 | ES 128 | M00056703A:D06 |
| ES 101 | M00006783B:F07 | ES 128 | M00056705D:E07 |
| ES 101 | M00006789D:A11 | ES 128 | M00056707B:E02 |
| ES 101 | M00006795D:A03 | ES 128 | M00056707D:D05 |
| ES 101 | M00006795D:D07 | ES 128 | M00056708C:C06 |
| ES 101 | M00006803A:C07 | ES 128 | M00056708D:D11 |
| ES 101 | M00006806B:C09 | ES 128 | M00056709A:A05 |
| ES 101 | M00006807A:G12 | ES 128 | M00056710A:C01 |
| ES 101 | M00006810A:D11 | ES 128 | M00056710B:F05 |
| ES 101 | M00006811D:D12 | ES 128 | M00056710B:H09 |
| ES 101 | M00006819B:B05 | ES 128 | M00056710D:F07 |
| ES 101 | M00006821D:B01 | ES 128 | M00056711A:C01 |
| ES 101 | M00006822C:A09 | ES 128 | M00056711A:F05 |
| ES 101 | M00006822D:E09 | ES 128 | M00056711A:F05 |
| ES 101 | M00006831D:H05 | ES 128 | M00056711D:A05 |
| ES 101 | M00006846A:D03 | ES 128 | M00056712C:A07 |
| ES 101 | M00006852A:C07 | ES 128 | M00056712C:B06 |
| ES 101 | M00006859B:D04 | ES 128 | M00056713D:G08 |
| ES 101 | M00006861B:A08 | ES 128 | M00056714C:H06 |
| ES 101 | M00006867C:F12 | ES 128 | M00056715A:D10 |
| ES 101 | M00006871D:F01 | ES 128 | M00056715A:E04 |
| ES 101 | M00006873C:E12 | ES 129 | M00056715A:G01 |
| ES 101 | M00006873D:B01 | ES 129 | M00056715B:C01 |
| ES 101 | M00006885C:G11 | ES 129 | M00056715D:C04 |
| ES 101 | M00006888A:G05 | ES 129 | M00056715D:E08 |
| ES 101 | M00006892B:F09 | ES 129 | M00056717B:C04 |
| ES 101 | M00006894D:A03 | ES 129 | M00056718C:B01 |
| ES 101 | M00006917B:A05 | ES 129 | M00056718C:G02 |
| ES 101 | M00006917C:A04 | ES 129 | M00056719A:D06 |
| ES 101 | M00006917D:D08 | ES 129 | M00056719A:F12 |
| ES 101 | M00006921A:H08 | ES 129 | M00056719B:A09 |
| ES 101 | M00006923B:H05 | ES 129 | M00056721A:F07 |
| ES 101 | M00006928A:A04 | ES 129 | M00056722A:G01 |
| ES 101 | M00006928B:D01 | ES 129 | M00056723B:D10 |
| ES 101 | M00006928B:D01 | ES 129 | M00056723C:C11 |
| ES 101 | M00006937D:F03 | ES 129 | M00056724D:E11 |
| ES 101 | M00006964A:A11 | ES 129 | M00056726C:G05 |
| ES 101 | M00006967B:B05 | ES 129 | M00056728A:H05 |
| ES 101 | M00006976B:D05 | ES 129 | M00056728B:D05 |
| ES 101 | M00006979D:B10 | ES 129 | M00056729B:D04 |
| ES 101 | M00006987A:G11 | ES 129 | M00056729C:H12 |
| ES 101 | M00006989C:E04 | ES 129 | M00056733C:D09 |
| ES 101 | M00006990D:E02 | ES 129 | M00056735D:B08 |
| ES 102 | M00006996C:F10 | ES 129 | M00056737B:G07 |
| ES 102 | M00006997A:A03 | ES 129 | M00056739A:D11 |
| ES 102 | M00007006B:A01 | ES 129 | M00056739B:D08 |
| ES 102 | M00007007B:H05 | ES 129 | M00056740C:B05 |
| ES 102 | M00007028C:C04 | ES 129 | M00056741B:C06 |
| ES 102 | M00007028C:C04 | ES 129 | M00056746D:A02 |
| ES 102 | M00007032C:F09 | ES 129 | M00056746D:D06 |
| ES 102 | M00007034B:B06 | ES 129 | M00056747A:D05 |
| ES 102 | M00007035C:E06 | ES 129 | M00056752A:E01 |
| ES 102 | M00007065C:F11 | ES 129 | M00056753D:A10 |
| ES 102 | M00007084B:G04 | ES 129 | M00056754A:A04 |
| ES 102 | M00007092D:F03 | ES 129 | M00056754B:D09 |
| ES 102 | M00007096A:E02 | ES 129 | M00056754B:H04 |
| ES 102 | M00007096C:E01 | ES 129 | M00056754D:A05 |
| ES 102 | M00007096D:H02 | ES 129 | M00056756B:A05 |
| ES 102 | M00007097A:B04 | ES 129 | M00056756D:B08 |
| ES 102 | M00007097D:D07 | ES 129 | M00056757B:F03 |
| ES 102 | M00007098A:C05 | ES 129 | M00056758B:C05 |
| ES 102 | M00007105D:C12 | ES 129 | M00056759A:F11 |
| ES 102 | M00007108A:D01 | ES 129 | M00056759B:G03 |
| ES 102 | M00007110C:F03 | ES 129 | M00056760D:A04 |
| ES 102 | M00007112A:A12 | ES 129 | M00056761A:F05 |
| ES 102 | M00007117D:H03 | ES 129 | M00056762C:E05 |
| ES 102 | M00007121C:G08 | ES 129 | M00056763C:D05 |
| ES 102 | M00007128B:G06 | ES 129 | M00056764A:E08 |
| ES 102 | M00007129A:F08 | ES 129 | M00056765A:A10 |
| ES 102 | M00007131C:A01 | ES 130 | M00056765C:E12 |
| ES 102 | M00007135D:B11 | ES 130 | M00056765D:D10 |
| ES 102 | M00007135D:B11 | ES 130 | M00056766B:A10 |
| ES 102 | M00007136C:C05 | ES 130 | M00056771C:F12 |
| ES 102 | M00007146D:F11 | ES 130 | M00056771D:C12 |
| ES 102 | M00007151A:B11 | ES 130 | M00056772D:A04 |
| ES 102 | M00007156A:E06 | ES 130 | M00056772D:A04 |
| ES 102 | M00007156D:F08 | ES 130 | M00056772D:E08 |
| ES 102 | M00007166A:E06 | ES 130 | M00056773A:H11 |
| ES 102 | M00007172B:C03 | ES 130 | M00056774B:A02 |
| ES 102 | M00007174C:D06 | ES 130 | M00056775D:A07 |
| ES 102 | M00007177A:E11 | ES 130 | M00056775D:C01 |
| ES 102 | M00007178C:D03 | ES 130 | M00056775D:C08 |
| ES 102 | M00007192A:E06 | ES 130 | M00056776D:A06 |
| ES 102 | M00007194A:E06 | ES 130 | M00056776D:D09 |
| ES 102 | M00007194B:B04 | ES 130 | M00056777B:C03 |
| ES 102 | M00007204C:G12 | ES 130 | M00056777D:B02 |
| ES 102 | M00007204D:D01 | ES 130 | M00056777D:F07 |
| ES 102 | M00008014A:B01 | ES 130 | M00056779A:E12 |
| ES 102 | M00008015D:B10 | ES 130 | M00056779D:H10 |
| ES 102 | M00008015D:F08 | ES 130 | M00056779D:H10 |
| ES 102 | M00008020C:C03 | ES 130 | M00056780D:C02 |
| ES 103 | M00008023B:D12 | ES 130 | M00056780D:F09 |
| ES 103 | M00008043B:B11 | ES 130 | M00056781C:E12 |
| ES 103 | M00008059D:B08 | ES 130 | M00056782D:B06 |
| ES 103 | M00008065A:B05 | ES 130 | M00056783B:G11 |
| ES 103 | M00008065C:F02 | ES 130 | M00056784A:B05 |
| ES 103 | M00008075C:A12 | ES 130 | M00056785B:F08 |
| ES 103 | M00008076C:F02 | ES 130 | M00056789A:C04 |
| ES 103 | M00008079C:C03 | ES 130 | M00056789D:E10 |
| ES 103 | M00008085B:C09 | ES 130 | M00056791D:F12 |
| ES 103 | M00008089A:E09 | ES 130 | M00056793C:H07 |
| ES 103 | M00008098D:H01 | ES 130 | M00056796A:H05 |
| ES 103 | M00008099B:G08 | ES 130 | M00056799B:E11 |
| ES 103 | M00021620B:F10 | ES 130 | M00056802B:H01 |
| ES 103 | M00021626C:C04 | ES 130 | M00056802B:H01 |
| ES 103 | M00021626D:F04 | ES 130 | M00056804B:E06 |
| ES 103 | M00021628B:B11 | ES 130 | M00056805D:B09 |
| ES 103 | M00021628B:D07 | ES 130 | M00056808B:B12 |
| ES 103 | M00021649A:E12 | ES 130 | M00056811A:C04 |
| ES 103 | M00021654A:A04 | ES 130 | M00056812C:E08 |
| ES 103 | M00021654A:A04 | ES 130 | M00056815A:B01 |
| ES 103 | M00021655C:H02 | ES 130 | M00056816B:A10 |
| ES 103 | M00021670D:G05 | ES 130 | M00056817C:C03 |
| ES 103 | M00021681D:C02 | ES 130 | M00056821D:C09 |
| ES 103 | M00021681D:C02 | ES 130 | M00056822C:G11 |
| ES 103 | M00022189A:B03 | ES 130 | M00056823A:B05 |
| ES 103 | M00022216D:D06 | ES 130 | M00056823C:A07 |
| ES 103 | M00022221A:D06 | ES 131 | M00056824B:C10 |
| ES 103 | M00022221D:D06 | ES 131 | M00056824D:E01 |
| ES 103 | M00022231D:E12 | ES 131 | M00056826A:B12 |
| ES 103 | M00022234B:D05 | ES 131 | M00056830C:G02 |
| ES 103 | M00022235C:C11 | ES 131 | M00056833C:C01 |
| ES 103 | M00022236A:A02 | ES 131 | M00056839A:G01 |
| ES 103 | M00022246A:H08 | ES 131 | M00056839A:G02 |
| ES 103 | M00022251C:A09 | ES 131 | M00056839C:F01 |
| ES 103 | M00022253A:E03 | ES 131 | M00056840D:H09 |
| ES 103 | M00022259C:B07 | ES 131 | M00056841D:G09 |
| ES 103 | M00022273B:A09 | ES 131 | M00056842B:F12 |
| ES 103 | M00022279B:H04 | ES 131 | M00056842B:F12 |
| ES 103 | M00022280A:G11 | ES 131 | M00056843B:H09 |
| ES 103 | M00022370A:G02 | ES 131 | M00056844A:E07 |
| ES 103 | M00022411D:G12 | ES 131 | M00056844C:A10 |
| ES 103 | M00022415C:B06 | ES 131 | M00056848B:C07 |
| ES 103 | M00022420B:H03 | ES 131 | M00056850B:E11 |
| ES 103 | M00022430B:D10 | ES 131 | M00056850B:E11 |
| ES 103 | M00022430C:D04 | ES 131 | M00056857B:C09 |
| ES 103 | M00022440D:D01 | ES 131 | M00056858A:B03 |
| ES 103 | M00022444A:C11 | ES 131 | M00056858B:A12 |
| ES 103 | M00022452A:B07 | ES 131 | M00056859A:D12 |
| ES 104 | M00022453B:H04 | ES 131 | M00056860A:F12 |
| ES 104 | M00022453B:H04 | ES 131 | M00056863C:E03 |
| ES 104 | M00022457C:G05 | ES 131 | M00056864B:H09 |
| ES 104 | M00022465D:F05 | ES 131 | M00056866B:E05 |
| ES 104 | M00022468A:E12 | ES 131 | M00056868D:E09 |
| ES 104 | M00022468C:E10 | ES 131 | M00056870A:E10 |
| ES 104 | M00022470B:G01 | ES 131 | M00056872A:A06 |
| ES 104 | M00022470B:G01 | ES 131 | M00056873C:E06 |
| ES 104 | M00022472D:E11 | ES 131 | M00056874B:H06 |
| ES 104 | M00022473D:B06 | ES 131 | M00056874C:D05 |
| ES 104 | M00022496D:F04 | ES 131 | M00056874D:G01 |
| ES 104 | M00022508A:C02 | ES 131 | M00056879A:E05 |
| ES 104 | M00022509A:B06 | ES 131 | M00056879B:H11 |
| ES 104 | M00022516B:E09 | ES 131 | M00056879D:A02 |
| ES 104 | M00022517B:E03 | ES 131 | M00056880D:B04 |
| ES 104 | M00022528A:H12 | ES 131 | M00056883D:A07 |
| ES 104 | M00022533C:E06 | ES 131 | M00056884B:C06 |
| ES 104 | M00022537A:C11 | ES 131 | M00056885C:C06 |
| ES 104 | M00022550C:B04 | ES 131 | M00056886A:C11 |
| ES 104 | M00022559D:D09 | ES 131 | M00056887B:F08 |
| ES 104 | M00022561A:A06 | ES 131 | M00056892C:A01 |
| ES 104 | M00022565A:A05 | ES 131 | M00056893B:H06 |
| ES 104 | M00022565A:A05 | ES 131 | M00056894D:G06 |
| ES 104 | M00022569A:A07 | ES 131 | M00056895B:A07 |
| ES 104 | M00022571C:D11 | ES 131 | M00056896A:F05 |
| ES 104 | M00021854C:E07 | ES 131 | M00056896A:F10 |
| ES 104 | M00021864A:E07 | ES 132 | M00056898D:D04 |
| ES 104 | M00021869D:D01 | ES 132 | M00056901A:A06 |
| ES 104 | M00021886D:F06 | ES 132 | M00056902A:H12 |
| ES 104 | M00021911A:H03 | ES 132 | M00056909B:E11 |
| ES 104 | M00021915B:E10 | ES 132 | M00056909C:D09 |
| ES 104 | M00021925C:H10 | ES 132 | M00056911B:F02 |
| ES 104 | M00021947B:C06 | ES 132 | M00056913B:G10 |
| ES 104 | M00022010B:H01 | ES 132 | M00056914D:B09 |
| ES 104 | M00022013D:H05 | ES 132 | M00056916C:B02 |
| ES 104 | M00022015D:F11 | ES 132 | M00056916C:F04 |
| ES 104 | M00022015D:F11 | ES 132 | M00056921A:C07 |
| ES 104 | M00022025C:D02 | ES 132 | M00056923C:E09 |
| ES 104 | M00022049C:B07 | ES 132 | M00056924D:B06 |
| ES 104 | M00022050C:D04 | ES 132 | M00056925D:C07 |
| ES 104 | M00022052D:A08 | ES 132 | M00056939A:F08 |
| ES 104 | M00022058D:A01 | ES 132 | M00056939D:B02 |
| ES 104 | M00022060B:F09 | ES 132 | M00056941D:E02 |
| ES 104 | M00022106B:D04 | ES 132 | M00056945A:B11 |
| ES 104 | M00022123A:D05 | ES 132 | M00056947D:F09 |
| ES 104 | M00022129A:E12 | ES 132 | M00056949C:F06 |
| ES 104 | M00022132A:D10 | ES 132 | M00056951B:F09 |
| ES 104 | M00022132C:F04 | ES 132 | M00056952C:A06 |
| ES 105 | M00022137B:G04 | ES 132 | M00056952D:H04 |
| ES 105 | M00022143A:C10 | ES 132 | M00056953B:A06 |
| ES 105 | M00022143A:D01 | ES 132 | M00056955B:G09 |
| ES 105 | M00022143A:D01 | ES 132 | M00056956B:F01 |
| ES 105 | M00022148A:A06 | ES 132 | M00056960A:C05 |
| ES 105 | M00022149C:C01 | ES 132 | M00056961A:B08 |
| ES 105 | M00022149D:C06 | ES 132 | M00056961C:G12 |
| ES 105 | M00022151A:D11 | ES 132 | M00056964B:A02 |
| ES 105 | M00022151A:G05 | ES 132 | M00056966D:A11 |
| ES 105 | M00022163A:C08 | ES 132 | M00056967A:D02 |
| ES 105 | M00022598B:E12 | ES 132 | M00056967A:E07 |
| ES 105 | M00022598C:D05 | ES 132 | M00056969B:C08 |
| ES 105 | M00022617B:C02 | ES 132 | M00056969D:B01 |
| ES 105 | M00022624C:C02 | ES 132 | M00056972A:F05 |
| ES 105 | M00022641A:C10 | ES 132 | M00056973D:B08 |
| ES 105 | M00022641A:E06 | ES 132 | M00056974C:F04 |
| ES 105 | M00022641B:F02 | ES 132 | M00056976C:F10 |
| ES 105 | M00022645D:A05 | ES 132 | M00056977A:G03 |
| ES 105 | M00022645D:C07 | ES 132 | M00056985B:C05 |
| ES 105 | M00022651D:B04 | ES 132 | M00056986A:F11 |
| ES 105 | M00022651D:C01 | ES 132 | M00056986D:G01 |
| ES 105 | M00022655A:D10 | ES 132 | M00056990C:B09 |
| ES 105 | M00022656D:E11 | ES 132 | M00056990D:C11 |
| ES 105 | M00022660A:B04 | ES 132 | M00056993A:B06 |
| ES 105 | M00022667A:C05 | ES 132 | M00056993D:D03 |
| ES 105 | M00022667D:E11 | ES 132 | M00056994B:F07 |
| ES 105 | M00022681D:E06 | ES 133 | M00056994C:C03 |
| ES 105 | M00022697A:D12 | ES 133 | M00056996D:A12 |
| ES 105 | M00022702B:B04 | ES 133 | M00056997C:H09 |
| ES 105 | M00022716C:C06 | ES 133 | M00056998A:E08 |
| ES 105 | M00022716C:C06 | ES 133 | M00057002D:B05 |
| ES 105 | M00022719A:F12 | ES 133 | M00057002D:B06 |
| ES 105 | M00022720B:A11 | ES 133 | M00057003B:B09 |
| ES 105 | M00022720C:C09 | ES 133 | M00057005B:C01 |
| ES 105 | M00022724C:D04 | ES 133 | M00057005C:D03 |
| ES 105 | M00022738B:D06 | ES 133 | M00057007C:B12 |
| ES 105 | M00022741B:B11 | ES 133 | M00057008C:E09 |
| ES 105 | M00022745C:C07 | ES 133 | M00057011A:D03 |
| ES 105 | M00022750A:A07 | ES 133 | M00057013B:D01 |
| ES 105 | M00022750A:A07 | ES 133 | M00057015A:C12 |
| ES 105 | M00022791B:F11 | ES 133 | M00057019C:H02 |
| ES 105 | M00022813B:A08 | ES 133 | M00057023A:H09 |
| ES 105 | M00022820D:C06 | ES 133 | M00057024A:E02 |
| ES 105 | M00022823A:D03 | ES 133 | M00057024A:G05 |
| ES 105 | M00022828A:C06 | ES 133 | M00057024D:H08 |
| ES 105 | M00022829A:H06 | ES 133 | M00057025C:A08 |
| ES 105 | M00022829C:H10 | ES 133 | M00057027C:G06 |
| ES 105 | M00022831B:H07 | ES 133 | M00057028D:D09 |
| ES 106 | M00022831C:A09 | ES 133 | M00057029A:C12 |
| ES 106 | M00022831D:C04 | ES 133 | M00057029D:A06 |
| ES 106 | M00022834C:G01 | ES 133 | M00057033A:F09 |
| ES 106 | M00022836A:G03 | ES 133 | M00057035B:C09 |
| ES 106 | M00022853C:C11 | ES 133 | M00057041D:B11 |
| ES 106 | M00022861D:B10 | ES 133 | M00057044C:F06 |
| ES 106 | M00022872A:B05 | ES 133 | M00057047B:C02 |
| ES 106 | M00022876B:B05 | ES 133 | M00057049A:G06 |
| ES 106 | M00022876D:D08 | ES 133 | M00057049C:H05 |
| ES 106 | M00022880C:G09 | ES 133 | M00057052D:B11 |
| ES 106 | M00022892C:G07 | ES 133 | M00057052D:G09 |
| ES 106 | M00022895B:B11 | ES 133 | M00057055B:G08 |
| ES 106 | M00022897D:H03 | ES 133 | M00057055B:G08 |
| ES 106 | M00022898C:F04 | ES 133 | M00057058C:F09 |
| ES 106 | M00022899A:C09 | ES 133 | M00057059D:F06 |
| ES 106 | M00022901D:E11 | ES 133 | M00057059D:H09 |
| ES 106 | M00022901D:E11 | ES 133 | M00057060B:A12 |
| ES 106 | M00022902C:H10 | ES 133 | M00057061C:D04 |
| ES 106 | M00022908B:H03 | ES 133 | M00057063A:C08 |
| ES 106 | M00022911B:G01 | ES 133 | M00057065C:D04 |
| ES 106 | M00022928A:F03 | ES 133 | M00057066A:A04 |
| ES 106 | M00022934D:B03 | ES 133 | M00057070D:B08 |
| ES 106 | M00022956B:B09 | ES 133 | M00057072B:E02 |
| ES 106 | M00022961A:B11 | ES 133 | M00057073D:A05 |
| ES 106 | M00022973A:G07 | ES 133 | M00057074D:C09 |
| ES 106 | M00022973C:G08 | ES 133 | M00057074D:C09 |
| ES 106 | M00022974D:D10 | ES 134 | M00055909B:G01 |
| ES 106 | M00022995C:E02 | ES 134 | M00055909C:E08 |
| ES 106 | M00022997A:C08 | ES 134 | M00055911B:E06 |
| ES 106 | M00022998B:C08 | ES 134 | M00055912C:E10 |
| ES 106 | M00023002D:G10 | ES 134 | M00055912D:C05 |
| ES 106 | M00023015A:D10 | ES 134 | M00055913B:D05 |
| ES 106 | M00023015C:D02 | ES 134 | M00055919A:A06 |
| ES 106 | M00023020D:G09 | ES 134 | M00055921A:E03 |
| ES 106 | M00023023C:F03 | ES 134 | M00055921B:B11 |
| ES 106 | M00023029A:E06 | ES 134 | M00055922A:C02 |
| ES 106 | M00023331D:A11 | ES 134 | M00055924A:H11 |
| ES 106 | M00023347D:C12 | ES 134 | M00055930A:B08 |
| ES 106 | M00023377D:C09 | ES 134 | M00055931A:A03 |
| ES 106 | M00023393D:C02 | ES 134 | M00055931A:C01 |
| ES 106 | M00023393D:E12 | ES 134 | M00055931B:E01 |
| ES 106 | M00023399C:C08 | ES 134 | M00055936B:E07 |
| ES 106 | M00023409A:G08 | ES 134 | M00055937B:C02 |
| ES 106 | M00023414B:F03 | ES 134 | M00055941B:B12 |
| ES 106 | M00023428C:D03 | ES 134 | M00055941B:B12 |
| ES 106 | M00023428D:F11 | ES 134 | M00055945A:H11 |
| ES 106 | M00023430B:D10 | ES 134 | M00055945B:E10 |
| ES 106 | M00023518C:A04 | ES 134 | M00055946D:G07 |
| ES 107 | M00023520A:G07 | ES 134 | M00055951C:C02 |
| ES 107 | M00026804D:D03 | ES 134 | M00055956C:E02 |
| ES 107 | M00026805B:B04 | ES 134 | M00055958D:F02 |
| ES 107 | M00026848C:G11 | ES 134 | M00055959D:A12 |
| ES 107 | M00026854A:E07 | ES 134 | M00055966C:A03 |
| ES 107 | M00026856C:C11 | ES 134 | M00055966C:D06 |
| ES 107 | M00026860D:E01 | ES 134 | M00055971C:E07 |
| ES 107 | M00026861D:A09 | ES 134 | M00055973A:D04 |
| ES 107 | M00026865D:G11 | ES 134 | M00055976B:F01 |
| ES 107 | M00026866A:H08 | ES 134 | M00055979B:B09 |
| ES 107 | M00026873B:E11 | ES 134 | M00055980A:A10 |
| ES 107 | M00026873D:B08 | ES 134 | M00055981D:A07 |
| ES 107 | M00026879A:B02 | ES 134 | M00055984C:C02 |
| ES 107 | M00026879C:D10 | ES 134 | M00055985D:D01 |
| ES 107 | M00026890C:D02 | ES 134 | M00055990C:B05 |
| ES 107 | M00026893C:A01 | ES 134 | M00055992C:E11 |
| ES 107 | M00026896D:E10 | ES 134 | M00056139D:E04 |
| ES 107 | M00026899C:G11 | ES 134 | M00056139D:G01 |
| ES 107 | M00026899C:G11 | ES 134 | M00056140B:H07 |
| ES 107 | M00026900B:C02 | ES 134 | M00056140D:E07 |
| ES 107 | M00026902A:G04 | ES 134 | M00056141A:D05 |
| ES 107 | M00026906B:C10 | ES 134 | M00056141D:B09 |
| ES 107 | M00026909A:G03 | ES 134 | M00056143A:E09 |
| ES 107 | M00026917D:H03 | ES 134 | M00056144B:C09 |
| ES 107 | M00026926D:C08 | ES 134 | M00056145C:B04 |
| ES 107 | M00026934D:E09 | ES 134 | M00056149C:B01 |
| ES 107 | M00026936D:C12 | ES 135 | M00056150B:C12 |
| ES 107 | M00026937C:B08 | ES 135 | M00056153C:D01 |
| ES 107 | M00026938A:F04 | ES 135 | M00056156D:A12 |
| ES 107 | M00026938A:F04 | ES 135 | M00056160D:A08 |
| ES 107 | M00026949B:H10 | ES 135 | M00056161D:G04 |
| ES 107 | M00026950A:F12 | ES 135 | M00056162B:F08 |
| ES 107 | M00026950D:H01 | ES 135 | M00056162B:F08 |
| ES 107 | M00026951A:G06 | ES 135 | M00056162D:D06 |
| ES 107 | M00026951A:G11 | ES 135 | M00056162D:E09 |
| ES 107 | M00026951A:G11 | ES 135 | M00056167D:B08 |
| ES 107 | M00026951C:D03 | ES 135 | M00056169A:F06 |
| ES 107 | M00026975C:B03 | ES 135 | M00056171C:H11 |
| ES 107 | M00026977A:E09 | ES 135 | M00056171C:H12 |
| ES 107 | M00026984A:D10 | ES 135 | M00056180B:H09 |
| ES 107 | M00026985C:B05 | ES 135 | M00056184B:D08 |
| ES 107 | M00026986B:H10 | ES 135 | M00056184C:H03 |
| ES 107 | M00026993B:H06 | ES 135 | M00056184D:F01 |
| ES 107 | M00026994C:A07 | ES 135 | M00056185D:A03 |
| ES 107 | M00026996D:A06 | ES 135 | M00056185D:D06 |
| ES 107 | M00027000C:F05 | ES 135 | M00056186C:F02 |
| ES 107 | M00027006B:H01 | ES 135 | M00056190D:G02 |
| ES 107 | M00027013D:E10 | ES 135 | M00056192D:E04 |
| ES 108 | M00027014C:G04 | ES 135 | M00056192D:H02 |
| ES 108 | M00027014D:G04 | ES 135 | M00056195B:C08 |
| ES 108 | M00027016D:G06 | ES 135 | M00056198A:D07 |
| ES 108 | M00027021D:H11 | ES 135 | M00056199D:A09 |
| ES 108 | M00027028D:C07 | ES 135 | M00056201C:H08 |
| ES 108 | M00027030C:C08 | ES 135 | M00056203A:H10 |
| ES 108 | M00027034B:D09 | ES 135 | M00056204B:A04 |
| ES 108 | M00027034C:D11 | ES 135 | M00056205B:D01 |
| ES 108 | M00027035D&H09 | ES 135 | M00056206A:E06 |
| ES 108 | M00027039A:F06 | ES 136 | M00055997C:G11 |
| ES 108 | M00027039B:E09 | ES 136 | M00055999C:G10 |
| ES 108 | M00027042C:G11 | ES 136 | M00055999D:G06 |
| ES 108 | M00027046B:E05 | ES 136 | M00056000A:F12 |
| ES 108 | M00027051A:A07 | ES 136 | M00056000C:D09 |
| ES 108 | M00027054B:B03 | ES 136 | M00056001A:B06 |
| ES 108 | M00027076D:F07 | ES 136 | M00056001A:B07 |
| ES 108 | M00027084C:H10 | ES 136 | M00056001C:E09 |
| ES 108 | M00027088D:H06 | ES 136 | M00056003A:E06 |
| ES 108 | M00027090A:E08 | ES 136 | M00056005B:E05 |
| ES 108 | M00027093C:B08 | ES 136 | M00056005D:C04 |
| ES 108 | M00027096A:G07 | ES 136 | M00056007A:A11 |
| ES 108 | M00027097C:G11 | ES 136 | M00056007C:F06 |
| ES 108 | M00027111A:H04 | ES 136 | M00056016D:D06 |
| ES 108 | M00027134A:G02 | ES 136 | M00056018B:G05 |
| ES 108 | M00027139D:C06 | ES 136 | M00056020A:D10 |
| ES 108 | M00027140A:C11 | ES 136 | M00056020D:D07 |
| ES 108 | M00027163A:D11 | ES 136 | M00056028C:F03 |
| ES 108 | M00027165C:F11 | ES 136 | M00056036D:B06 |
| ES 108 | M00027168C:H10 | ES 136 | M00056037C:B02 |
| ES 108 | M00027171D:B07 | ES 136 | M00056038D:F04 |
| ES 108 | M00027172A:C03 | ES 136 | M00056041A:C04 |
| ES 108 | M00027173D:D08 | ES 136 | M00056042A:A01 |
| ES 108 | M00027183B:B01 | ES 136 | M00056045D:H01 |
| ES 108 | M00027193C:C05 | ES 136 | M00056050C:A03 |
| ES 108 | M00027194D:A05 | ES 136 | M00056053A:A09 |
| ES 108 | M00027197A:G07 | ES 136 | M00056053A:D12 |
| ES 108 | M00027197B:F07 | ES 136 | M00056055A:A07 |
| ES 108 | M00027203B:H08 | ES 136 | M00056055B:B01 |
| ES 108 | M00027207B:E09 | ES 136 | M00056055C:D03 |
| ES 108 | M00027217A:G03 | ES 136 | M00056058A:H04 |
| ES 108 | M00027220A:B12 | ES 136 | M00056060B:B10 |
| ES 108 | M00027222A:C09 | ES 136 | M00056061B:F06 |
| ES 108 | M00027229D:E06 | ES 136 | M00056066D:H07 |
| ES 108 | M00027231D:A03 | ES 136 | M00056067B:D08 |
| ES 108 | M00027524B:B11 | ES 136 | M00056074D:G10 |
| ES 108 | M00027527A:G04 | ES 136 | M00056077D:E06 |
| ES 108 | M00027532C:C02 | ES 136 | M00056077D:E12 |
| ES 108 | M00027535D:E08 | ES 136 | M00056077D:E12 |
| ES 109 | M00027536D:G12 | ES 136 | M00056079B:D12 |
| ES 109 | M00027543C:B09 | ES 136 | M00056079B:F07 |
| ES 109 | M00027543D:G07 | ES 136 | M00056079C:C11 |
| ES 109 | M00027556D:G10 | ES 136 | M00056081D:B05 |
| ES 109 | M00027561C:C04 | ES 136 | M00056081D:B09 |
| ES 109 | M00027562B:C02 | ES 136 | M00056082C:F06 |
| ES 109 | M00027564A:D03 | ES 136 | M00056085D:H11 |
| ES 109 | M00027571C:C11 | ES 136 | M00056094A:H07 |
| ES 109 | M00027573A:F09 | ES 136 | M00056098A:H01 |
| ES 109 | M00027578B:F05 | ES 136 | M00056099B:G09 |
| ES 109 | M00027578C:E04 | ES 136 | M00056099B:H11 |
| ES 109 | M00027580C:E10 | ES 136 | M00056099B:H11 |
| ES 109 | M00027581B:E01 | ES 136 | M00056103A:D12 |
| ES 109 | M00027588A:C01 | ES 136 | M00056103C:H12 |
| ES 109 | M00027588C:A06 | ES 136 | M00056107B:E06 |
| ES 109 | M00027594B:C03 | ES 136 | M00056108D:B12 |
| ES 109 | M00027604A:G10 | ES 136 | M00056108D:B12 |
| ES 109 | M00027604A:G10 | ES 136 | M00056110C:D09 |
| ES 109 | M00027605C:E05 | ES 136 | M00056111D:H02 |
| ES 109 | M00027607A:H05 | ES 136 | M00056112A:H02 |
| ES 109 | M00027608C:H07 | ES 136 | M00056114C:C06 |
| ES 109 | M00027616C:G12 | ES 136 | M00056125B:D09 |
| ES 109 | M00027628C:A01 | ES 136 | M00056128C:B10 |
| ES 109 | M00027639B:E11 | ES 136 | M00056131B:C12 |
| ES 109 | M00027641B:A01 | ES 136 | M00056133D:D09 |
| ES 109 | M00027652B:G03 | ES 136 | M00056136A:B11 |

[0289] TABLE 9

| | | | | Pri- | | | | | | | | | |
|---|---|---|---|---|---|---|---|---|---|---|---|---|---|
| | | | | mary | Hist- | | | | | | | | |
| | | Ana- | | Tu- | o- | | | Inci- | Reg- | | | Dist | |
| Pat- | Path | tom- | Primary | mor | path | | Lymph- | dence | ional | Distant | Descrip | Met | |
| ient | Report | ical | Tumor | Gr- | Gr- | Local | node | Lym- | Lym- | Met & | Distant | Gr- | |
| ID | ID | Loc | size | ade | ade | Invasion | Met | phn | ph | Loc | Met | ade | Comment |
| 15 | 21 | Ascend- | 4.0 | T3 | G2 | extending into | positive | 3/8 | N1 | negative | | MX | invasive |
| | | ing | | | | subserosal | | | | | | | adenocarcinoma, |
| | | colon | | | | adipose tissue | | | | | | | moderately |
| | | | | | | | | | | | | | differentiated; |
| | | | | | | | | | | | | | focal perincural |
| | | | | | | | | | | | | | invasion is seen |
| 52 | 71 | Ascend- | 9.0 | T3 | G3 | Invasion | negative | 0/12 | N0 | negative | | M0 | Hyperplastic |
| | | ing | | | | through | | | | | | | polyp in |
| | | colon | | | | muscularis | | | | | | | appendix. |
| | | | | | | propria, | | | | | | | |
| 121 | 140 | Sigmoid | 6 | T4 | G2 | Invasion of | negative | 0/34 | N0 | negative | | M0 | Perineural |
| | | | | | | muscularis | | | | | | | invasion; donut |
| | | | | | | propria into | | | | | | | anastomosis |
| | | | | | | serosa, | | | | | | | negative. One |
| | | | | | | involving | | | | | | | tubulovillous |
| 125 | 144 | Cecum | 6 | T3 | G2 | Invasion | negative | 0/19 | N0 | negative | | M0 | patient history |
| | | | | | | through the | | | | | | | of metastatic |
| | | | | | | muscularis | | | | | | | melanoma |
| | | | | | | propria into | | | | | | | |
| | | | | | | suserosal | | | | | | | |
| | | | | | | adipose tissue. | | | | | | | |
| | | | | | | Ileocecal | | | | | | | |
| | | | | | | junction. | | | | | | | |
| 128 | 147 | Trans- | 5.0 | T3 | G2 | Invasion of | positive | 1/5 | N1 | negative | | M0 | |
| | | verse | | | | museularis | | | | | | | |
| | | colon | | | | propria into | | | | | | | |
| | | | | | | percolonic fat | | | | | | | |
| 130 | 149 | Splenic | 5.5 | T3 | | through wall | positive | 10/24 | N2 | negative | | M1 | |
| | | flexure | | | | and into | | | | | | | |
| | | | | | | surrounding | | | | | | | |
| | | | | | | adipose tissue | | | | | | | |
| 133 | 152 | Rectum | 5.0 | T3 | G2 | Invasion | negative | 0/9 | N0 | negative | | M0 | Small separate |
| | | | | | | through | | | | | | | tubular |
| | | | | | | muscularis | | | | | | | adenoma (0.4 |
| | | | | | | propria into non | | | | | | | cm) |
| | | | | | | peritonealized | | | | | | | |
| | | | | | | pericolic tissue, | | | | | | | |
| | | | | | | gross | | | | | | | |
| | | | | | | configuration is | | | | | | | |
| | | | | | | annular. | | | | | | | |
| 141 | 160 | Cecrum | 5.5 | T3 | G2 | Invasion of | positive | 7/21 | N2 | positive | adenpcarcinoma | M1 | Perineural |
| | | | | | | muscularis | | | | (Liver) | consitant | | invasion |
| | | | | | | propria into | | | | | with | | identified |
| | | | | | | pericolonic | | | | | primary | | adjacent to |
| | | | | | | adipose tissue, | | | | | | | metastatic |
| | | | | | | but not through | | | | | | | adenocarcinoma |
| | | | | | | serosa. Arising | | | | | | | |
| | | | | | | from tubular | | | | | | | |
| | | | | | | adenoma. | | | | | | | |
| 156 | 175 | Hepatic | 3.8 | T3 | G2 | Invasion | positive | 2/13 | N1 | negative | | M0 | Separate |
| | | flexure | | | | through | | | | | | | tubolovillous |
| | | | | | | mucsularis | | | | | | | and tubular |
| | | | | | | propria into | | | | | | | adenomas |
| | | | | | | subserosa/peric | | | | | | | |
| | | | | | | olic adipose, no | | | | | | | |
| | | | | | | serosal | | | | | | | |
| | | | | | | involvement. | | | | | | | |
| | | | | | | Gross | | | | | | | |
| | | | | | | configuration | | | | | | | |
| | | | | | | annular. | | | | | | | |
| 228 | 247 | Rectum | 5.8 | T3 | G2 | Invasion | positive | 1/8 | N1 | negative | | MX | Hyperplastic |
| | | | | | to | through | | | | | | | polyps |
| | | | | | G3 | muscularis | | | | | | | |
| | | | | | | propria to | | | | | | | |
| | | | | | | involve | | | | | | | |
| | | | | | | subserosal, | | | | | | | |
| | | | | | | perirectoal | | | | | | | |
| | | | | | | adipose, and | | | | | | | |
| | | | | | | serosa | | | | | | | |
| 264 | 283 | Ascend- | 5.5 | T3 | G2 | Invasion | negative | 0/10 | N0 | negative | | M0 | Tubulovillous |
| | | ing | | | | through | | | | | | | adenoma with |
| | | colon | | | | muscularis | | | | | | | high grade |
| | | | | | | propria into | | | | | | | dysplasia |
| | | | | | | subserosal | | | | | | | |
| | | | | | | adipose tissue | | | | | | | |
| 266 | 285 | Trans- | 9 | T3 | G2 | Invades through | negative | 0/15 | N1 | positive | 0.4 cm, | MX | |
| | | verse | | | | muscularis | | | | (Mesen- | may | | |
| | | colon | | | | propria to | | | | teric | represent | | |
| | | | | | | involve | | | | deposit) | lymph node | | |
| | | | | | | pericolonic | | | | | completely | | |
| | | | | | | adipose, | | | | | replaced by | | |
| | | | | | | extends to | | | | | tumor | | |
| | | | | | | serosa. | | | | | | | |
| 268 | 287 | Cecum | 6.5 | T2 | G2 | Invades full | negative | 0/12 | N0 | negative | | M0 | |
| | | | | | | thickness of | | | | | | | |
| | | | | | | muscularis | | | | | | | |
| | | | | | | propria, but | | | | | | | |
| | | | | | | mesenteric | | | | | | | |
| | | | | | | adipose free of | | | | | | | |
| | | | | | | malignancy | | | | | | | |
| 278 | 297 | Rectum | 4 | T3 | G2 | Invasion into | positive | 7/10 | N2 | negative | | M0 | Descending |
| | | | | | | perirectal | | | | | | | colon polyps, |
| | | | | | | adipose tissue. | | | | | | | no HGD or |
| | | | | | | | | | | | | | carcinoma |
| | | | | | | | | | | | | | identified. |
| 295 | 314 | Ascend- | 5.0 | T3 | G2 | Invasion | negative | 0/12 | N0 | negative | | M0 | Melanosis coli |
| | | ing | | | | through | | | | | | | and diverticular |
| | | colon | | | | muscularis | | | | | | | disease. |
| | | | | | | propria into | | | | | | | |
| | | | | | | percolic adipose | | | | | | | |
| | | | | | | tissue. | | | | | | | |
| 339 | 358 | Recto- | 6 | T3 | G2 | Extends into | negative | 0/6 | N0 | negative | | M0 | 1 hyperplastic |
| | | sigmoid | | | | perirectal fat | | | | | | | polyp identified |
| | | | | | | but does not | | | | | | | |
| | | | | | | reach serosa | | | | | | | |
| 341 | 360 | Ascend- | 2 cm | T3 | G2 | Invasion | negative | 0/4 | N0 | negative | | MX | |
| | | ing | invasive | | | through | | | | | | | |
| | | colon | | | | muscularis | | | | | | | |
| | | | | | | propria to | | | | | | | |
| | | | | | | involve | | | | | | | |
| | | | | | | pericolonic fat. | | | | | | | |
| | | | | | | Arising from | | | | | | | |
| | | | | | | villous | | | | | | | |
| | | | | | | adenoma. | | | | | | | |
| 356 | 375 | Sigmoid | 6.5 | T3 | G2 | Through colon | negative | 0/4 | N0 | negative | | M0 | |
| | | | | | | wall into | | | | | | | |
| | | | | | | subserosal | | | | | | | |
| | | | | | | adipose tissue | | | | | | | |
| | | | | | | No serosal | | | | | | | |
| | | | | | | spread seen. | | | | | | | |
| 360 | 412 | Ascend- | 4.3 | T3 | G2 | Invasion thru | positive | 1/5 | N1 | negative | | M0 | Two mucosal |
| | | ing | | | | muscularis | | | | | | | polyps |
| | | colon | | | | propria to | | | | | | | |
| | | | | | | pericolonic fat | | | | | | | |
| 392 | 444 | Ascend- | 2 | T3 | G2 | Invasion | positive | 1/6 | N1 | positive | Macrovesicular | M1 | Tumor arising |
| | | ing | | | | through | | | | (Liver) | and | | at prior |
| | | colon | | | | muscularis | | | | | microvesicular | | ileocolic |
| | | | | | | propria into | | | | | steatosis | | surgical |
| | | | | | | subserosal | | | | | | | anastomosis. |
| | | | | | | adipose tissue, | | | | | | | |
| | | | | | | not serosa. | | | | | | | |
| 393 | 445 | Cecum | 6.0 | T3 | G2 | Cecum, invades | negative | 0/21 | N0 | negative | | M0 | |
| | | | | | | through | | | | | | | |
| | | | | | | muscularis | | | | | | | |
| | | | | | | propria to | | | | | | | |
| | | | | | | involve | | | | | | | |
| | | | | | | subserosal | | | | | | | |
| | | | | | | adipose tissue | | | | | | | |
| | | | | | | but not serosa. | | | | | | | |
| 413 | 465 | Ascend- | 4.8 | T3 | G2 | Invasive | negative | 0/7 | N0 | positive | ademocarcinoma | M1 | rediagnosis of |
| | | ing | | | | through | | | | (Liver) | in | | oophorectomy |
| | | colon | | | | muscularis to | | | | | multiple | | path to |
| | | | | | | involve | | | | | slides | | metastatic |
| | | | | | | periserosal fat, | | | | | | | colon cancer. |
| | | | | | | abutting | | | | | | | |
| | | | | | | ileocccal | | | | | | | |
| | | | | | | junction | | | | | | | |
| 505 | 383 | | 7.5 cm | T3 | G2 | Invasion | positive | 2/17 | N1 | positive | moderately | M1 | Anatomical |
| | | | max | | | through | | | | (Liver) | differentiated | | location of |
| | | | dim | | | muscularis | | | | | adenocarcinoma, | | primary not |
| | | | | | | propria | | | | | consistant | | notated in |
| | | | | | | involving | | | | | with | | report. |
| | | | | | | pericolic | | | | | primary | | Evidence of |
| | | | | | | adipose, serosal | | | | | | | chronic colitis. |
| | | | | | | surface | | | | | | | |
| | | | | | | uninvolved | | | | | | | |
| 517 | 395 | Sigmoid | 3 | T3 | G2 | penetrates | positive | 6/6 | N2 | negative | | M0 | No mention of |
| | | | | | | muscularis | | | | | | | distant met in |
| | | | | | | propria, | | | | | | | report |
| | | | | | | involves | | | | | | | |
| | | | | | | pericolonic fat | | | | | | | |
| 534 | 553 | Ascend- | 12 | T3 | G3 | Invasion | negative | 0/8 | N0 | negative | | M0 | Omentum with |
| | | ing | | | | through the | | | | | | | fibrosis and fat |
| | | colon | | | | muscularis | | | | | | | necrosis. Small |
| | | | | | | propria | | | | | | | bowel with |
| | | | | | | involving | | | | | | | acute and |
| | | | | | | pericolic fat | | | | | | | chronic |
| | | | | | | Serosa free | | | | | | | serositis, focal |
| | | | | | | of tumor | | | | | | | abscess and |
| | | | | | | | | | | | | | adhesions |
| 546 | 565 | Ascend- | 5.5 | T3 | G2 | Invasion | positive | 6/12 | N2 | positive | metastatic | M1 | |
| | | ing | | | | through | | | | (Liver) | adenocarcinoma | | |
| | | colon | | | | muscularis | | | | | | | |
| | | | | | | propria | | | | | | | |
| | | | | | | extensively | | | | | | | |
| | | | | | | through | | | | | | | |
| | | | | | | submucosal and | | | | | | | |
| | | | | | | extending to | | | | | | | |
| | | | | | | serosa. | | | | | | | |
| 577 | 596 | Cecum | 11.5 | T3 | G2 | Invasion | negative | 0/58 | N0 | negative | | M0 | Appendix |
| | | | | | | through the | | | | | | | dilated/ and |
| | | | | | | bowel wall, into | | | | | | | fibrotic, but not |
| | | | | | | suberosal | | | | | | | involved by |
| | | | | | | adipose. | | | | | | | tumor |
| | | | | | | Serosal surface | | | | | | | |
| | | | | | | free of tumor | | | | | | | |
| 695 | 714 | Cecum | 14 | T3 | G2 | extending | negative | 022 | N0 | negative | | MX | tubular |
| | | | | | | through bowel | | | | | | | adenoma and |
| | | | | | | wall into | | | | | | | hyperplastic |
| | | | | | | scrosal fat | | | | | | | polyps present, |
| | | | | | | | | | | | | | moderately |
| | | | | | | | | | | | | | differentiated |
| | | | | | | | | | | | | | adenoma with |
| | | | | | | | | | | | | | mucinous |
| | | | | | | | | | | | | | diferentiation |
| | | | | | | | | | | | | | (% not stated) |
| 784 | 803 | Ascend- | 3.5 | T3 | G3 | through | positive | 5/17 | N2 | positive | | M1 | invasive poorly |
| | | ing | | | | muscularis | | | | (Liver) | | | differentiated |
| | | colon | | | | propria into | | | | | | | adenosquamous |
| | | | | | | pericolic soft | | | | | | | carcinoma |
| | | | | | | tissues | | | | | | | |
| 786 | 805 | De- | 9.5 | T3 | G2 | through | negative | 0/12 | N0 | positive | | M1 | moderately |
| | | scend- | | | | muscularis | | | | (Liver) | | | differentiated |
| | | ing | | | | propria into | | | | | | | invasive |
| | | colon | | | | pericolic fat, | | | | | | | adenocarcinoma |
| | | | | | | but not at | | | | | | | |
| | | | | | | serosal surface | | | | | | | |
| 791 | 810 | Ascend- | 5.8 | T3 | G3 | through the | positive | 13/25 | N2 | positive | | M1 | poorly |
| | | ing | | | | muscularis | | | | (Liver) | | | differentiated |
| | | colon | | | | propria into | | | | | | | invasive |
| | | | | | | pericolic fat | | | | | | | colonic |
| | | | | | | | | | | | | | adenocarcinoma |
| 888 | 908 | Ascend- | 2.0 | T2 | G1 | into muscularis | positive | 3/21 | N0 | positive | | M1 | well- to |
| | | ing | | | | propria | | | | (Liver) | | | moderately- |
| | | colon | | | | | | | | | | | differentiated |
| | | | | | | | | | | | | | adenocarcinoma; |
| | | | | | | | | | | | | | this patient |
| | | | | | | | | | | | | | has tumors of |
| | | | | | | | | | | | | | the ascending |
| | | | | | | | | | | | | | colon and the |
| | | | | | | | | | | | | | sigmoid colon |
| 889 | 909 | Cecum | 4.8 | T3 | G2 | through | positive | 1/4 | N1 | positive | | M1 | moderately |
| | | | | | | muscularis | | | | (Liver) | | | differentiated |
| | | | | | | propria int | | | | | | | adenocarcinoma |

[0290] TABLE 10

| | % Pts | % Pts | % Pts | | | | |
|---|---|---|---|---|---|---|---|
| SEQ ID | > = 2× | > = 2_5× | > = 5× | | | | |
| NO | T/N | T/N | T/N | P15 | P52 | P121 | P125 |
| 18 | 30.3 | 15.2 | 3.0 | 1.855 | 2.705 | 1.000 | 2.280 |
| 22 | 45.5 | 39.4 | 18.2 | 2.196 | 1.719 | 0.604 | 2.388 |
| 127 | 27.3 | 18.2 | 6.1 | 1.000 | 1.620 | 1.822 | 1.692 |
| 139 | 21.2 | 18.2 | 15.2 | 1000.000 | 0.001 | 2.345 | 1.000 |
| 148 | 27.3 | 18.2 | 6.1 | 1.000 | 1.620 | 1.822 | 1.692 |
| 155 | 45.5 | 12.1 | 3.0 | 1.870 | 3.104 | 1.361 | 2.388 |
| 246 | 42.4 | 9.1 | 0.0 | 2.211 | 2.347 | 1.000 | 1.493 |
| 272 | 48.5 | 27.3 | 12.1 | 1.735 | 3.110 | 1.379 | 2.277 |
| 273 | 21.2 | 18.2 | 18.2 | 1.000 | 1.000 | 0.330 | 1.349 |
| 279 | 24.2 | 12.1 | 0.0 | 1.614 | 2.348 | 1.498 | 1.916 |
| 298 | 21.2 | 18.2 | 18.2 | 1.000 | 1.000 | 0.330 | 1.349 |
| 329 | 21.2 | 9.1 | 6.1 | 1.000 | 1.000 | 2.211 | 1.182 |
| 353 | 45.5 | 12.1 | 3.0 | 1.870 | 3.104 | 1.361 | 2.388 |
| 354 | 48.5 | 30.3 | 3.0 | 1.000 | 1.592 | 2.248 | 2.315 |
| 381 | 27.3 | 18.2 | 6.1 | 1.000 | 1.620 | 1.822 | 1.692 |
| 389 | 21.2 | 9.1 | 6.1 | 1.000 | 1.000 | 2.211 | 1.182 |
| 405 | 21.2 | 9.1 | 3.0 | 1.000 | 2.366 | 1.546 | 1.562 |
| 406 | 21.2 | 9.1 | 3.0 | 1.000 | 2.366 | 1.546 | 1.562 |
| 412 | 36.4 | 18.2 | 0.0 | 2.584 | 1.332 | 1.952 | 1.641 |
| 421 | 51.5 | 24.2 | 3.0 | 2.481 | 2.253 | 2.234 | 1.431 |
| 465 | 21.2 | 18.2 | 15.2 | 1000.000 | 0.001 | 2.345 | 1.000 |
| 534 | 21.2 | 9.1 | 3.0 | 1.000 | 2.366 | 1.546 | 1.562 |
| 538 | 42.4 | 15.2 | 0.0 | 1.489 | 2.019 | 3.022 | 1.121 |
| 565 | 45.5 | 12.1 | 3.0 | 1.870 | 3.104 | 1.361 | 2.388 |
| 657 | 45.5 | 30.3 | 3.0 | 1.512 | 2.748 | 0.784 | 2.162 |
| 670 | 24.2 | 6.1 | 0.0 | 1.190 | 1.000 | 0.656 | 1.456 |
| 739 | 21.2 | 12.1 | 0.0 | 1.936 | 1.830 | 0.831 | 1.347 |
| 741 | 48.5 | 18.2 | 0.0 | 2.750 | 2.458 | 1.485 | 1.151 |
| 744 | 48.5 | 21.2 | 0.0 | 2.069 | 3.002 | 1.229 | 1.631 |
| 755 | 30.3 | 18.2 | 3.0 | 1.000 | 1.414 | 1.236 | 1.738 |
| 757 | 21.2 | 15.2 | 6.1 | 1.000 | 0.839 | 2.032 | 2.557 |
| 810 | 30.3 | 18.2 | 3.0 | 1.000 | 1.414 | 1.236 | 1.738 |
| 811 | 30.3 | 18.2 | 3.0 | 1.000 | 1.414 | 1.236 | 1.738 |
| 845 | 30.3 | 15.2 | 9.1 | 1.000 | 0.271 | 0.860 | 1.310 |
| 861 | 24.2 | 21.2 | 15.2 | 1000.000 | 1000.000 | 1.000 | 1.320 |
| 915 | 30.3 | 15.2 | 3.0 | 1.855 | 2.705 | 1.000 | 2.280 |
| 954 | 24.2 | 21.2 | 15.2 | 1000.000 | 1000.000 | 1.000 | 1.320 |
| 955 | 39.4 | 21.2 | 3.0 | 1.612 | 2.281 | 0.785 | 2.045 |
| 991 | 39.4 | 21.2 | 3.0 | 1.612 | 2.281 | 0.785 | 2.045 |
| 1035 | 24.2 | 6.1 | 0.0 | 1.190 | 1.000 | 0.656 | 1.456 |
| 1049 | 21.2 | 12.1 | 0.0 | 1.936 | 1.830 | 0.831 | 1.347 |
| 1050 | 39.4 | 21.2 | 3.0 | 1.612 | 2.281 | 0.785 | 2.045 |
| 1235 | 45.5 | 12.1 | 3.0 | 1.870 | 3.104 | 1.361 | 2.388 |
| 1292 | 21.2 | 3.0 | 0.0 | 1.558 | 2.014 | 2.250 | 1.643 |
| 1313 | 24.2 | 6.1 | 0.0 | 1.190 | 1.000 | 0.656 | 1.456 |
| 1331 | 27.3 | 9.1 | 3.0 | 1.327 | 3.749 | 1.000 | 2.045 |
| 1334 | 48.5 | 30.3 | 3.0 | 1.000 | 1.592 | 2.248 | 2.315 |
| 1418 | 30.3 | 15.2 | 3.0 | 1.855 | 2.705 | 1.000 | 2.280 |
| 1419 | 45.5 | 12.1 | 3.0 | 1.870 | 3.104 | 1.361 | 2.388 |
| 1420 | 39.4 | 18.2 | 3.0 | 1.759 | 1.566 | 1.000 | 2.302 |
| 1477 | 39.4 | 18.2 | 3.0 | 1.759 | 1.566 | 1.000 | 2.302 |
| 1554 | 33.3 | 15.2 | 0.0 | 1.829 | 1.622 | 1.882 | 1.957 |
| 1579 | 42.4 | 9.1 | 0.0 | 2.211 | 2.347 | 1.000 | 1.493 |
| 1600 | 45.5 | 12.1 | 3.0 | 1.870 | 3.104 | 1.361 | 2.388 |
| 1639 | 48.5 | 27.3 | 12.1 | 1.735 | 3.110 | 1.379 | 2.277 |
| 1657 | 42.4 | 24.2 | 0.0 | 1.000 | 1.908 | 2.267 | 1.188 |
| 1679 | 33.3 | 15.2 | 0.0 | 1.829 | 1.622 | 1.882 | 1.957 |
| 1744 | 42.4 | 15.2 | 3.0 | 2.059 | 2.753 | 1.679 | 1.587 |
| 1847 | 78.8 | 63.6 | 9.1 | 2.625 | 4.493 | 1.642 | 2.743 |
| 1877 | 45.5 | 12.1 | 3.0 | 1.870 | 3.104 | 1.361 | 2.388 |
| 1880 | 66.7 | 48.5 | 6.1 | 1.000 | 4.075 | 1.754 | 2.436 |
| 1889 | 45.5 | 12.1 | 3.0 | 1.870 | 3.104 | 1.361 | 2.388 |
| 2009 | 30.3 | 15.2 | 3.0 | 1.855 | 2.705 | 1.000 | 2.280 |
| 2023 | 30.3 | 18.2 | 0.0 | 1.285 | 2.400 | 0.767 | 1.270 |
| 2029 | 42.4 | 9.1 | 0.0 | 2.211 | 2.347 | 1.000 | 1.493 |
| 2071 | 24.2 | 6.1 | 0.0 | 1.190 | 1.000 | 0.656 | 1.456 |
| 2077 | 24.2 | 6.1 | 0.0 | 1.190 | 1.000 | 0.656 | 1.456 |
| 2103 | 27.3 | 21.2 | 0.0 | 3.505 | 0.793 | 0.809 | 1.348 |
| 2109 | 24.2 | 6.1 | 0.0 | 1.190 | 1.000 | 0.656 | 1.456 |
| 2138 | 33.3 | 21.2 | 9.1 | 1.000 | 0.296 | 3.016 | 0.794 |
| 2143 | 60.6 | 48.5 | 12.1 | 6.263 | 1.000 | 1.832 | 1.937 |
| 2183 | 63.6 | 45.5 | 12.1 | 1.945 | 2.010 | 0.547 | 3.325 |
| 2185 | 30.3 | 18.2 | 3.0 | 1.000 | 1.414 | 1.236 | 1.738 |
| 2190 | 24.2 | 6.1 | 0.0 | 1.190 | 1.000 | 0.656 | 1.456 |
| 2200 | 45.5 | 12.1 | 3.0 | 1.870 | 3.104 | 1.361 | 2.388 |
| 2206 | 60.6 | 27.3 | 3.0 | 2.256 | 2.228 | 1.673 | 1.937 |
| 2220 | 33.3 | 24.2 | 3.0 | 2.591 | 0.483 | 2.580 | 1.440 |
| 2224 | 48.5 | 36.4 | 3.0 | 1.602 | 3.209 | 1.000 | 2.942 |
| 2249 | 45.5 | 12.1 | 3.0 | 1.870 | 3.104 | 1.361 | 2.388 |
| 2255 | 24.2 | 3.0 | 0.0 | 1.985 | 2.261 | 1.000 | 0.904 |
| 2265 | 54.5 | 42.4 | 6.1 | 1.886 | 1.000 | 1.503 | 3.375 |
| 2267 | 84.8 | 57.6 | 18.2 | 2.529 | 3.042 | 2.471 | 1.669 |
| 2281 | 54.5 | 36.4 | 3.0 | 2.008 | 0.686 | 3.104 | 1.362 |
| 2294 | 30.3 | 15.2 | 3.0 | 1.855 | 2.705 | 1.000 | 2.280 |
| 2300 | 30.3 | 15.2 | 3.0 | 1.855 | 2.705 | 1.000 | 2.280 |
| 2307 | 42.4 | 9.1 | 0.0 | 2.211 | 2.347 | 1.000 | 1.493 |
| 2309 | 42.4 | 21.2 | 9.1 | 2.497 | 1.837 | 3.249 | 1.497 |
| 2313 | 57.6 | 48.5 | 9.1 | 2.603 | 2.642 | 1.000 | 1.939 |
| 2314 | 48.5 | 27.3 | 12.1 | 1.735 | 3.110 | 1.379 | 2.277 |
| 2316 | 42.4 | 9.1 | 0.0 | 2.211 | 2.347 | 1.000 | 1.493 |
| 2327 | 39.4 | 24.2 | 3.0 | 2.006 | 1.692 | 1.778 | 1.662 |
| 2348 | 72.7 | 45.5 | 0.0 | 2.961 | 3.152 | 2.712 | 1.346 |

[0291] TABLE 11

| SEQ ID | | | | | | | | |
|---|---|---|---|---|---|---|---|---|
| NO | P128 | P130 | P133 | P141 | P156 | P228 | P264 | P266 |
| 18 | 0.713 | 1.800 | 1.955 | 0.663 | 0.466 | 1.457 | 2.262 | 1.236 |
| 22 | 1.594 | 6.800 | 1.340 | 1.131 | 1.000 | 2.647 | 1.628 | 1.190 |
| 127 | 3.761 | 1.000 | 1.000 | 1.587 | 2.127 | 1.000 | 1.000 | 1.000 |
| 139 | 1000.000 | 1.000 | 1000.000 | 0.482 | 2.846 | 0.767 | 1.631 | 1.000 |
| 148 | 3.761 | 1.000 | 1.000 | 1.587 | 2.127 | 1.000 | 1.000 | 1.000 |
| 155 | 2.062 | 1.781 | 2.302 | 1.000 | 1.000 | 1.306 | 2.099 | 1.357 |
| 246 | 1.779 | 1.337 | 2.865 | 1.515 | 1.617 | 1.301 | 2.098 | 1.733 |
| 272 | 2.044 | 2.219 | 4.257 | 0.744 | 1.000 | 1.127 | 1.588 | 1.634 |
| 273 | 1000.000 | 1000.000 | 1.000 | 1.000 | 0.566 | 1.554 | 1.000 | 1.000 |
| 279 | 1.202 | 1.852 | 2.370 | 1.000 | 1.000 | 1.114 | 1.399 | 1.239 |
| 298 | 1000.000 | 1000.000 | 1.000 | 1.000 | 0.566 | 1.554 | 1.000 | 1.000 |
| 329 | 3.234 | 0.001 | 1.000 | 8.480 | 2.077 | 1.000 | 0.001 | 1.445 |
| 353 | 2.062 | 1.781 | 2.302 | 1.000 | 1.000 | 1.306 | 2.099 | 1.357 |
| 354 | 1.664 | 1.987 | 2.307 | 2.728 | 1.000 | 1.239 | 1.469 | 2.059 |
| 381 | 3.761 | 1.000 | 1.000 | 1.587 | 2.127 | 1.000 | 1.000 | 1.000 |
| 389 | 3.234 | 0.001 | 1.000 | 8.480 | 2.077 | 1.000 | 0.001 | 1.445 |
| 405 | 1.531 | 1.553 | 1.854 | 2.044 | 1.363 | 1.786 | 1.877 | 1.644 |
| 406 | 1.531 | 1.553 | 1.854 | 2.044 | 1.363 | 1.786 | 1.877 | 1.644 |
| 412 | 1.831 | 1.503 | 2.326 | 1.130 | 1.773 | 1.379 | 2.318 | 2.019 |
| 421 | 2.209 | 1.889 | 3.114 | 1.776 | 1.788 | 1.879 | 2.666 | 2.257 |
| 465 | 1000.000 | 1.000 | 1000.000 | 0.482 | 2.846 | 0.767 | 1.631 | 1.000 |
| 534 | 1.531 | 1.553 | 1.854 | 2.044 | 1.363 | 1.786 | 1.877 | 1.644 |
| 538 | 1.559 | 1.000 | 1.740 | 3.133 | 2.186 | 1.869 | 2.023 | 2.483 |
| 565 | 2.062 | 1.781 | 2.302 | 1.000 | 1.000 | 1.306 | 2.099 | 1.357 |
| 657 | 1.524 | 1.770 | 2.846 | 1.185 | 1.000 | 1.460 | 1.831 | 2.261 |
| 670 | 1.182 | 1.636 | 1.418 | 1.298 | 1.000 | 1.000 | 1.127 | 0.774 |
| 739 | 0.845 | 1.286 | 1.872 | 1.000 | 1.000 | 1.295 | 1.722 | 1.785 |
| 741 | 1.819 | 1.801 | 3.227 | 1.457 | 2.960 | 1.388 | 2.086 | 2.410 |
| 744 | 2.515 | 1.605 | 2.399 | 1.803 | 2.524 | 1.551 | 2.284 | 1.574 |
| 755 | 1.000 | 0.754 | 2.234 | 3.723 | 1.000 | 1.285 | 1.771 | 2.246 |
| 757 | 0.745 | 1.332 | 1000.000 | 1.000 | 1.000 | 1.781 | 1.515 | 1.747 |
| 810 | 1.000 | 0.754 | 2.234 | 3.723 | 1.000 | 1.285 | 1.771 | 2.246 |
| 811 | 1.000 | 0.754 | 2.234 | 3.723 | 1.000 | 1.285 | 1.771 | 2.246 |
| 845 | 2.331 | 1.641 | 1000.000 | 1.252 | 1.000 | 0.595 | 1.950 | 0.616 |
| 861 | 2.888 | 1.000 | 0.001 | 1.000 | 1.694 | 0.001 | 1000.000 | 1.423 |
| 915 | 0.713 | 1.800 | 1.955 | 0.663 | 0.466 | 1.457 | 2.262 | 1.236 |
| 954 | 2.888 | 1.000 | 0.001 | 1.000 | 1.694 | 0.001 | 1000.000 | 1.423 |
| 955 | 1.415 | 2.042 | 2.733 | 0.898 | 1.431 | 1.000 | 1.459 | 2.009 |
| 991 | 1.415 | 2.042 | 2.733 | 0.898 | 1.431 | 1.000 | 1.459 | 2.009 |
| 1035 | 1.182 | 1.636 | 1.418 | 1.298 | 1.000 | 1.000 | 1.127 | 0.774 |
| 1049 | 0.845 | 1.286 | 1.872 | 1.000 | 1.000 | 1.295 | 1.722 | 1.785 |
| 1050 | 1.415 | 2.042 | 2.733 | 0.898 | 1.431 | 1.000 | 1.459 | 2.009 |
| 1235 | 2.062 | 1.781 | 2.302 | 1.000 | 1.000 | 1.306 | 2.099 | 1.357 |
| 1292 | 1.804 | 1.641 | 1.876 | 1.335 | 0.766 | 1.245 | 1.500 | 1.000 |
| 1313 | 1.182 | 1.636 | 1.418 | 1.298 | 1.000 | 1.000 | 1.127 | 0.774 |
| 1331 | 1.427 | 1.669 | 1.837 | 1.265 | 1.000 | 1.667 | 1.000 | 1.374 |
| 1334 | 1.664 | 1.987 | 2.307 | 2.728 | 1.000 | 1.239 | 1.469 | 2.059 |
| 1418 | 0.713 | 1.800 | 1.955 | 0.663 | 0.466 | 1.457 | 2.262 | 1.236 |
| 1419 | 2.062 | 1.781 | 2.302 | 1.000 | 1.000 | 1.306 | 2.099 | 1.357 |
| 1420 | 1.518 | 1.997 | 2.298 | 2.273 | 1.000 | 1.234 | 1.186 | 1.730 |
| 1477 | 1.518 | 1.997 | 2.298 | 2.273 | 1.000 | 1.234 | 1.186 | 1.730 |
| 1554 | 2.959 | 1.821 | 2.234 | 1.181 | 1.827 | 1.000 | 2.042 | 1.970 |
| 1579 | 1.779 | 1.337 | 2.865 | 1.515 | 1.617 | 1.301 | 2.098 | 1.733 |
| 1600 | 2.062 | 1.781 | 2.302 | 1.000 | 1.000 | 1.306 | 2.099 | 1.357 |
| 1639 | 2.044 | 2.219 | 4.257 | 0.744 | 1.000 | 1.127 | 1.588 | 1.634 |
| 1657 | 2.160 | 1.416 | 1.000 | 3.531 | 2.974 | 1.798 | 1.899 | 2.065 |
| 1679 | 2.959 | 1.821 | 2.234 | 1.181 | 1.827 | 1.000 | 2.042 | 1.970 |
| 1744 | 1.479 | 1.669 | 2.442 | 1.352 | 1.367 | 1.605 | 2.145 | 2.098 |
| 1847 | 1.839 | 2.548 | 2.954 | 2.234 | 1.816 | 1.352 | 3.390 | 2.541 |
| 1877 | 2.062 | 1.781 | 2.302 | 1.000 | 1.000 | 1.306 | 2.099 | 1.357 |
| 1880 | 2.762 | 2.081 | 4.111 | 2.306 | 2.391 | 1.675 | 2.572 | 3.031 |
| 1889 | 2.062 | 1.781 | 2.302 | 1.000 | 1.000 | 1.306 | 2.099 | 1.357 |
| 2009 | 0.713 | 1.800 | 1.955 | 0.663 | 0.466 | 1.457 | 2.262 | 1.236 |
| 2023 | 1.871 | 1.869 | 2.588 | 1.834 | 1.718 | 1.197 | 1.965 | 2.023 |
| 2029 | 1.779 | 1.337 | 2.865 | 1.515 | 1.617 | 1.301 | 2.098 | 1.733 |
| 2071 | 1.182 | 1.636 | 1.418 | 1.298 | 1.000 | 1.000 | 1.127 | 0.774 |
| 2077 | 1.182 | 1.636 | 1.418 | 1.298 | 1.000 | 1.000 | 1.127 | 0.774 |
| 2103 | 2.297 | 0.855 | 1.659 | 1.607 | 0.252 | 1.602 | 2.866 | 1.292 |
| 2109 | 1.182 | 1.636 | 1.418 | 1.298 | 1.000 | 1.000 | 1.127 | 0.774 |
| 2138 | 2.074 | 1.438 | 1.552 | 2.403 | 0.647 | 0.605 | 0.469 | 0.528 |
| 2143 | 2.828 | 2.795 | 2.732 | 2.548 | 0.073 | 1.201 | 1.722 | 1.181 |
| 2183 | 1.714 | 3.061 | 4.635 | 1.688 | 1.230 | 1.241 | 1.237 | 1.852 |
| 2185 | 1.000 | 0.754 | 2.234 | 3.723 | 1.000 | 1.285 | 1.771 | 2.246 |
| 2190 | 1.182 | 1.636 | 1.418 | 1.298 | 1.000 | 1.000 | 1.127 | 0.774 |
| 2200 | 2.062 | 1.781 | 2.302 | 1.000 | 1.000 | 1.306 | 2.099 | 1.357 |
| 2206 | 2.229 | 2.131 | 2.194 | 2.235 | 2.121 | 1.388 | 3.468 | 2.115 |
| 2220 | 2.650 | 0.815 | 1.629 | 1.586 | 0.155 | 1.408 | 2.830 | 1.636 |
| 2224 | 1.385 | 2.044 | 2.510 | 0.628 | 1.763 | 1.000 | 1.000 | 1.687 |
| 2249 | 2.062 | 1.781 | 2.302 | 1.000 | 1.000 | 1.306 | 2.099 | 1.357 |
| 2255 | 1.454 | 1.000 | 1.567 | 2.350 | 1.729 | 2.071 | 1.439 | 1.540 |
| 2265 | 2.843 | 2.931 | 1.690 | 1.678 | 0.724 | 2.656 | 2.035 | 3.526 |
| 2267 | 2.490 | 1.937 | 3.729 | 2.105 | 2.224 | 2.547 | 2.605 | 4.402 |
| 2281 | 3.412 | 2.374 | 1.404 | 4.761 | 3.241 | 2.253 | 1.384 | 1.912 |
| 2294 | 0.713 | 1.800 | 1.955 | 0.663 | 0.466 | 1.457 | 2.262 | 1.236 |
| 2300 | 0.713 | 1.800 | 1.955 | 0.663 | 0.466 | 1.457 | 2.262 | 1.236 |
| 2307 | 1.779 | 1.337 | 2.865 | 1.515 | 1.617 | 1.301 | 2.098 | 1.733 |
| 2309 | 1.496 | 1.483 | 2.427 | 1.764 | 1.000 | 1.231 | 1.413 | 1.000 |
| 2313 | 1.452 | 1.915 | 2.252 | 1.342 | 2.516 | 1.278 | 2.179 | 4.223 |
| 2314 | 2.044 | 2.219 | 4.257 | 0.744 | 1.000 | 1.127 | 1.588 | 1.634 |
| 2316 | 1.779 | 1.337 | 2.865 | 1.515 | 1.617 | 1.301 | 2.098 | 1.733 |
| 2327 | 1.778 | 1.200 | 2.169 | 1.462 | 1.570 | 1.784 | 1.937 | 2.633 |
| 2348 | 2.064 | 1.288 | 2.075 | 2.527 | 2.239 | 1.745 | 3.772 | 3.393 |
| 2384 | 2.340 | 0.001 | 0.001 | 2.927 | 4.830 | 1.708 | 1.651 | 1.586 |

[0292] TABLE 12

| SEQ ID | | | | | | | | |
|---|---|---|---|---|---|---|---|---|
| NO | P268 | P278 | P295 | P339 | P341 | P356 | P360 | P392 |
| 18 | 1.000 | 2.819 | 1.000 | 1.589 | 1.238 | 1.784 | 0.748 | 2.486 |
| 22 | 1.194 | 1.000 | 1.000 | 1.474 | 3.006 | 2.766 | 1.622 | 10.061 |
| 127 | 2.953 | 2.030 | 8.118 | 1.000 | 2.854 | 1.000 | 1000.000 | 0.001 |
| 139 | 1000.000 | 1.332 | 1.000 | 0.344 | 1.537 | 1.000 | 0.001 | 0.464 |
| 148 | 2.953 | 2.030 | 8.118 | 1.000 | 2.854 | 1.000 | 1000.000 | 0.001 |
| 155 | 1.187 | 1.447 | 1.000 | 1.484 | 3.621 | 3.844 | 1.995 | 1.313 |
| 246 | 1.422 | 2.018 | 2.385 | 1.218 | 2.039 | 3.486 | 1.636 | 1.623 |
| 272 | 1.268 | 1.563 | 1.870 | 2.056 | 6.240 | 6.491 | 2.230 | 1.427 |
| 273 | 1.000 | 1000.000 | 1.000 | 1.196 | 2.209 | 1000.000 | 0.001 | 1.000 |
| 279 | 1.000 | 1.000 | 1.000 | 1.737 | 2.382 | 3.061 | 2.679 | 1.361 |
| 298 | 1.000 | 1000.000 | 1.000 | 1.196 | 2.209 | 1000.000 | 0.001 | 1.000 |
| 329 | 2.467 | 2.166 | 21.707 | 0.615 | 1.616 | 1.000 | 1.000 | 1.000 |
| 353 | 1.187 | 1.447 | 1.000 | 1.484 | 3.621 | 3.844 | 1.995 | 1.313 |
| 354 | 2.359 | 1.552 | 2.918 | 1.647 | 4.706 | 3.623 | 1.979 | 1.677 |
| 381 | 2.953 | 2.030 | 8.118 | 1.000 | 2.854 | 1.000 | 1000.000 | 0.001 |
| 389 | 2.467 | 2.166 | 21.707 | 0.615 | 1.616 | 1.000 | 1.000 | 1.000 |
| 405 | 1.221 | 1.796 | 1.995 | 1.780 | 1.726 | 2.970 | 1.792 | 1.581 |
| 406 | 1.221 | 1.796 | 1.995 | 1.780 | 1.726 | 2.970 | 1.792 | 1.581 |
| 412 | 2.677 | 2.809 | 2.969 | 1.373 | 2.087 | 3.804 | 1.612 | 1.163 |
| 421 | 2.468 | 5.262 | 4.008 | 1.487 | 4.366 | 2.078 | 1.781 | 1.332 |
| 465 | 1000.000 | 1.332 | 1.000 | 0.344 | 1.537 | 1.000 | 0.001 | 0.464 |
| 534 | 1.221 | 1.796 | 1.995 | 1.780 | 1.726 | 2.970 | 1.792 | 1.581 |
| 538 | 2.565 | 1.856 | 1.000 | 1.000 | 2.449 | 1.000 | 2.097 | 2.647 |
| 565 | 1.187 | 1.447 | 1.000 | 1.484 | 3.621 | 3.844 | 1.995 | 1.313 |
| 657 | 1.369 | 1.000 | 1.000 | 1.679 | 3.084 | 2.855 | 2.104 | 0.927 |
| 670 | 1.677 | 2.420 | 2.263 | 1.314 | 1.473 | 2.523 | 1.776 | 2.244 |
| 739 | 1.412 | 1.431 | 3.103 | 1.000 | 2.847 | 2.621 | 1.000 | 1.117 |
| 741 | 2.240 | 2.040 | 1.000 | 1.000 | 2.450 | 3.440 | 2.045 | 1.998 |
| 744 | 1.837 | 2.201 | 2.518 | 1.604 | 2.248 | 2.989 | 1.570 | 1.409 |
| 755 | 1.000 | 1.320 | 0.556 | 1.385 | 1.321 | 1.000 | 1.000 | 6.185 |
| 757 | 0.713 | 1000.000 | 0.632 | 2.389 | 0.202 | 1.000 | 1.000 | 0.356 |
| 810 | 1.000 | 1.320 | 0.556 | 1.385 | 1.321 | 1.000 | 1.000 | 6.185 |
| 811 | 1.000 | 1.320 | 0.556 | 1.385 | 1.321 | 1.000 | 1.000 | 6.185 |
| 845 | 2.151 | 2.384 | 2.417 | 0.573 | 1.451 | 2.652 | 1.000 | 0.734 |
| 861 | 1.000 | 1.509 | 9.879 | 1000.000 | 2.327 | 0.001 | 1.236 | 0.870 |
| 915 | 1.000 | 2.819 | 1.000 | 1.589 | 1.238 | 1.784 | 0.748 | 2.486 |
| 954 | 1.000 | 1.509 | 9.879 | 1000.000 | 2.327 | 0.001 | 1.236 | 0.870 |
| 955 | 1.657 | 1.732 | 3.510 | 1.652 | 4.946 | 4.071 | 2.194 | 1.932 |
| 991 | 1.657 | 1.732 | 3.510 | 1.652 | 4.946 | 4.071 | 2.194 | 1.932 |
| 1035 | 1.677 | 2.420 | 2.263 | 1.314 | 1.473 | 2.523 | 1.776 | 2.244 |
| 1049 | 1.412 | 1.431 | 3.103 | 1.000 | 2.847 | 2.621 | 1.000 | 1.117 |
| 1050 | 1.657 | 1.732 | 3.510 | 1.652 | 4.946 | 4.071 | 2.194 | 1.932 |
| 1235 | 1.187 | 1.447 | 1.000 | 1.484 | 3.621 | 3.844 | 1.995 | 1.313 |
| 1292 | 0.718 | 1.000 | 1.000 | 1.675 | 2.301 | 1.361 | 2.161 | 1.825 |
| 1313 | 1.677 | 2.420 | 2.263 | 1.314 | 1.473 | 2.523 | 1.776 | 2.244 |
| 1331 | 0.789 | 1.609 | 1.000 | 0.797 | 1.000 | 2.075 | 2.491 | 2.505 |
| 1334 | 2.359 | 1.552 | 2.918 | 1.647 | 4.706 | 3.623 | 1.979 | 1.677 |
| 1418 | 1.000 | 2.819 | 1.000 | 1.589 | 1.238 | 1.784 | 0.748 | 2.486 |
| 1419 | 1.187 | 1.447 | 1.000 | 1.484 | 3.621 | 3.844 | 1.995 | 1.313 |
| 1420 | 1.864 | 1.428 | 2.631 | 1.854 | 3.430 | 3.182 | 1.892 | 1.581 |
| 1477 | 1.864 | 1.428 | 2.631 | 1.854 | 3.430 | 3.182 | 1.892 | 1.581 |
| 1554 | 2.495 | 2.090 | 3.320 | 1.000 | 3.907 | 2.976 | 1.875 | 1.000 |
| 1579 | 1.422 | 2.018 | 2.385 | 1.218 | 2.039 | 3.486 | 1.636 | 1.623 |
| 1600 | 1.187 | 1.447 | 1.000 | 1.484 | 3.621 | 3.844 | 1.995 | 1.313 |
| 1639 | 1.268 | 1.563 | 1.870 | 2.056 | 6.240 | 6.491 | 2.230 | 1.427 |
| 1657 | 2.183 | 2.285 | 3.554 | 1.247 | 2.093 | 1.840 | 1.855 | 1.504 |
| 1679 | 2.495 | 2.090 | 3.320 | 1.000 | 3.907 | 2.976 | 1.875 | 1.000 |
| 1744 | 2.006 | 1.696 | 2.261 | 1.611 | 2.154 | 3.791 | 1.816 | 1.356 |
| 1847 | 1.535 | 2.851 | 4.154 | 2.055 | 6.047 | 4.103 | 3.367 | 2.029 |
| 1877 | 1.187 | 1.447 | 1.000 | 1.484 | 3.621 | 3.844 | 1.995 | 1.313 |
| 1880 | 2.274 | 1.266 | 4.526 | 2.591 | 5.409 | 3.138 | 2.675 | 1.391 |
| 1889 | 1.187 | 1.447 | 1.000 | 1.484 | 3.621 | 3.844 | 1.995 | 1.313 |
| 2009 | 1.000 | 2.819 | 1.000 | 1.589 | 1.238 | 1.784 | 0.748 | 2.486 |
| 2023 | 1.971 | 1.699 | 2.355 | 1.453 | 3.122 | 2.528 | 1.949 | 1.326 |
| 2029 | 1.422 | 2.018 | 2.385 | 1.218 | 2.039 | 3.486 | 1.636 | 1.623 |
| 2071 | 1.677 | 2.420 | 2.263 | 1.314 | 1.473 | 2.523 | 1.776 | 2.244 |
| 2077 | 1.677 | 2.420 | 2.263 | 1.314 | 1.473 | 2.523 | 1.776 | 2.244 |
| 2103 | 2.516 | 0.852 | 1.775 | 0.818 | 4.294 | 2.281 | 1.119 | 0.890 |
| 2109 | 1.677 | 2.420 | 2.263 | 1.314 | 1.473 | 2.523 | 1.776 | 2.244 |
| 2138 | 1.794 | 1.486 | 5.006 | 0.398 | 4.768 | 0.001 | 2.344 | 2.434 |
| 2143 | 2.079 | 1.664 | 1.000 | 1.871 | 2.812 | 2.693 | 5.094 | 1.947 |
| 2183 | 2.325 | 2.043 | 2.530 | 2.411 | 5.749 | 5.509 | 3.490 | 2.008 |
| 2185 | 1.000 | 1.320 | 0.556 | 1.385 | 1.321 | 1.000 | 1.000 | 6.185 |
| 2190 | 1.677 | 2.420 | 2.263 | 1.314 | 1.473 | 2.523 | 1.776 | 2.244 |
| 2200 | 1.187 | 1.447 | 1.000 | 1.484 | 3.621 | 3.844 | 1.995 | 1.313 |
| 2206 | 1.977 | 1.676 | 1.774 | 1.542 | 2.538 | 1.867 | 2.312 | 1.000 |
| 2220 | 2.942 | 0.729 | 1.772 | 0.861 | 5.794 | 2.349 | 1.363 | 0.808 |
| 2224 | 1.457 | 1.690 | 2.551 | 1.860 | 4.114 | 3.548 | 3.125 | 0.792 |
| 2249 | 1.18 | 1.447 | 1.000 | 1.484 | 3.621 | 3.844 | 1.995 | 1.313 |
| 2255 | 1.586 | 1.943 | 1.000 | 0.699 | 1.593 | 2.039 | 1.798 | 0.774 |
| 2265 | 2.157 | 1.922 | 3.895 | 4.143 | 2.655 | 1.914 | 2.159 | 3.312 |
| 2267 | 3.442 | 3.933 | 5.994 | 1.448 | 8.695 | 7.488 | 2.687 | 2.449 |
| 2281 | 2.467 | 1.000 | 7.584 | 1.417 | 3.693 | 1.947 | 1.539 | 4.429 |
| 2294 | 1.000 | 2.819 | 1.000 | 1.589 | 1.238 | 1.784 | 0.748 | 2.486 |
| 2300 | 1.000 | 2.819 | 1.000 | 1.589 | 1.238 | 1.784 | 0.748 | 2.486 |
| 2307 | 1.422 | 2.018 | 2.385 | 1.218 | 2.039 | 3.486 | 1.636 | 1.623 |
| 2309 | 2.485 | 2.369 | 1.000 | 1.820 | 3.354 | 5.046 | 1.820 | 0.703 |
| 2313 | 3.203 | 1.593 | 4.012 | 1.593 | 6.374 | 6.940 | 3.158 | 0.947 |
| 2314 | 1.268 | 1.563 | 1.870 | 2.056 | 6.240 | 6.491 | 2.230 | 1.427 |
| 2316 | 1.422 | 2.018 | 2.385 | 1.218 | 2.039 | 3.486 | 1.636 | 1.623 |
| 2327 | 2.439 | 1.482 | 2.156 | 1.390 | 3.500 | 3.654 | 1.655 | 0.771 |
| 2348 | 2.448 | 2.617 | 4.003 | 1.289 | 2.940 | 3.894 | 2.277 | 1.202 |
| 2384 | 2.328 | 1.359 | 9.253 | 0.383 | 1.835 | 0.001 | 1.000 | 0.714 |

[0293] TABLE 13

| SEQ ID | | | | | | | | |
|---|---|---|---|---|---|---|---|---|
| NO | P393 | P413 | P505 | P517 | P534 | P546 | P577 | P695 |
| 18 | 1.058 | 2.471 | 1.583 | 1.726 | 0.506 | 1.431 | 2.632 | 5.930 |
| 22 | 14.260 | 2.516 | 1.498 | 3.747 | 1.300 | 5.779 | 11.202 | 0.001 |
| 127 | 1.000 | 0.001 | 1.000 | 1.000 | 0.001 | 1.000 | 3.303 | 1.000 |
| 139 | 1.000 | 1.000 | 0.458 | 1.249 | 0.001 | 1000.000 | 0.702 | 1.000 |
| 148 | 1.000 | 0.001 | 1.000 | 1.000 | 0.001 | 1.000 | 3.303 | 1.000 |
| 155 | 1.137 | 2.268 | 2.414 | 1.382 | 2.107 | 2.210 | 2.384 | 5.256 |
| 246 | 0.741 | 2.181 | 2.494 | 1.504 | 1.511 | 1.831 | 2.064 | 4.421 |
| 272 | 1.348 | 2.222 | 2.506 | 1.355 | 1.670 | 2.535 | 1.556 | 8.411 |
| 273 | 1.000 | 1.000 | 1000.000 | 1.477 | 1.645 | 1.000 | 1.389 | 1.000 |
| 279 | 0.914 | 1.603 | 1.936 | 1.485 | 2.430 | 1.999 | 1.647 | 4.375 |
| 298 | 1.000 | 1.000 | 1000.000 | 1.477 | 1.645 | 1.000 | 1.389 | 1.000 |
| 329 | 1.000 | 1.000 | 1.436 | 0.517 | 1.000 | 1.469 | 1.000 | 1.000 |
| 353 | 1.137 | 2.268 | 2.414 | 1.382 | 2.107 | 2.210 | 2.384 | 5.256 |
| 354 | 1.224 | 3.432 | 2.806 | 1.328 | 2.470 | 2.592 | 1.929 | 6.973 |
| 381 | 1.000 | 0.001 | 1.000 | 1.000 | 0.001 | 1.000 | 3.303 | 1.000 |
| 389 | 1.000 | 1.000 | 1.436 | 0.517 | 1.000 | 1.469 | 1.000 | 1.000 |
| 405 | 1.241 | 1.841 | 1.470 | 1.000 | 1.672 | 2.218 | 1.649 | 7.555 |
| 406 | 1.241 | 1.841 | 1.470 | 1.000 | 1.672 | 2.218 | 1.649 | 7.555 |
| 412 | 1.258 | 2.153 | 1.849 | 1.445 | 1.000 | 1.531 | 1.637 | 3.302 |
| 421 | 1.000 | 1.327 | 2.871 | 1.116 | 1.903 | 2.200 | 2.644 | 0.001 |
| 465 | 1.000 | 1.000 | 0.458 | 1.249 | 0.001 | 1000.000 | 0.702 | 1.000 |
| 534 | 1.241 | 1.841 | 1.470 | 1.000 | 1.672 | 2.218 | 1.649 | 7.555 |
| 538 | 1.560 | 1.982 | 2.159 | 1.278 | 1.425 | 1.204 | 3.046 | 2.068 |
| 565 | 1.137 | 2.268 | 2.414 | 1.382 | 2.107 | 2.210 | 2.384 | 5.256 |
| 657 | 0.763 | 1.602 | 2.797 | 1.265 | 2.765 | 2.236 | 2.548 | 5.071 |
| 670 | 1.710 | 2.337 | 1.898 | 0.892 | 1.347 | 1.908 | 1.136 | 3.404 |
| 739 | 2.102 | 1.689 | 4.429 | 0.830 | 1.000 | 1.000 | 2.108 | 2.208 |
| 741 | 1.935 | 1.911 | 2.812 | 1.000 | 1.854 | 1.793 | 2.441 | 0.001 |
| 744 | 1.320 | 1.404 | 1.553 | 1.000 | 1.957 | 1.816 | 2.156 | 3.745 |
| 755 | 1.219 | 2.547 | 1.288 | 2.539 | 3.936 | 3.625 | 2.363 | 1.955 |
| 757 | 0.851 | 0.750 | 0.815 | 0.258 | 0.712 | 1.229 | 0.190 | 1.000 |
| 810 | 1.219 | 2.547 | 1.288 | 2.539 | 3.936 | 3.625 | 2.363 | 1.955 |
| 811 | 1.219 | 2.547 | 1.288 | 2.539 | 3.936 | 3.625 | 2.363 | 1.955 |
| 845 | 2.765 | 1.000 | 2.202 | 0.472 | 0.490 | 1.417 | 0.725 | 0.001 |
| 861 | 1.000 | 1.000 | 1.000 | 1.000 | 1.000 | 1.530 | 0.769 | 1.000 |
| 915 | 1.058 | 2.471 | 1.583 | 1.726 | 0.506 | 1.431 | 2.632 | 5.930 |
| 954 | 1.000 | 1.000 | 1.000 | 1.000 | 1.000 | 1.530 | 0.769 | 1.000 |
| 955 | 1.322 | 2.608 | 1.910 | 1.199 | 1.635 | 1.893 | 1.473 | 5.842 |
| 991 | 1.322 | 2.608 | 1.910 | 1.199 | 1.635 | 1.893 | 1.473 | 5.842 |
| 1035 | 1.710 | 2.337 | 1.898 | 0.892 | 1.347 | 1.908 | 1.136 | 3.404 |
| 1049 | 2.102 | 1.689 | 4.429 | 0.830 | 1.000 | 1.000 | 2.108 | 2.208 |
| 1050 | 1.322 | 2.608 | 1.910 | 1.199 | 1.635 | 1.893 | 1.473 | 5.842 |
| 1235 | 1.137 | 2.268 | 2.414 | 1.382 | 2.107 | 2.210 | 2.384 | 5.256 |
| 1292 | 1.000 | 1.518 | 1.980 | 1.518 | 2.526 | 1.588 | 1.865 | 2.251 |
| 1313 | 1.710 | 2.337 | 1.898 | 0.892 | 1.347 | 1.908 | 1.136 | 3.404 |
| 1331 | 0.743 | 2.126 | 1.613 | 1.177 | 2.128 | 1.000 | 1.951 | 6.931 |
| 1334 | 1.224 | 3.432 | 2.806 | 1.328 | 2.470 | 2.592 | 1.929 | 6.973 |
| 1418 | 1.058 | 2.471 | 1.583 | 1.726 | 0.506 | 1.431 | 2.632 | 5.930 |
| 1419 | 1.137 | 2.268 | 2.414 | 1.382 | 2.107 | 2.210 | 2.384 | 5.256 |
| 1420 | 1.205 | 3.301 | 2.749 | 1.256 | 2.474 | 2.345 | 1.826 | 8.108 |
| 1477 | 1.205 | 3.301 | 2.749 | 1.256 | 2.474 | 2.345 | 1.826 | 8.108 |
| 1554 | 1.000 | 1.793 | 2.719 | 1.679 | 1.000 | 1.549 | 2.076 | 0.001 |
| 1579 | 0.741 | 2.181 | 2.494 | 1.504 | 1.511 | 1.831 | 2.064 | 4.421 |
| 1600 | 1.137 | 2.268 | 2.414 | 1.382 | 2.107 | 2.210 | 2.384 | 5.256 |
| 1639 | 1.348 | 2.222 | 2.506 | 1.355 | 1.670 | 2.535 | 1.556 | 8.411 |
| 1657 | 2.809 | 1.534 | 1.366 | 1.197 | 2.545 | 1.964 | 1.506 | 0.001 |
| 1679 | 1.000 | 1.793 | 2.719 | 1.679 | 1.000 | 1.549 | 2.076 | 0.001 |
| 1744 | 1.249 | 2.009 | 1.832 | 1.488 | 1.379 | 1.975 | 2.128 | 13.930 |
| 1847 | 1.781 | 2.929 | 2.183 | 2.759 | 3.853 | 3.092 | 2.051 | 7.549 |
| 1877 | 1.137 | 2.268 | 2.414 | 1.382 | 2.107 | 2.210 | 2.384 | 5.256 |
| 1880 | 1.000 | 3.187 | 2.564 | 0.756 | 1.226 | 3.841 | 3.201 | 16.724 |
| 1889 | 1.137 | 2.268 | 2.414 | 1.382 | 2.107 | 2.210 | 2.384 | 5.256 |
| 2009 | 1.058 | 2.471 | 1.583 | 1.726 | 0.506 | 1.431 | 2.632 | 5.930 |
| 2023 | 1.952 | 1.472 | 1.917 | 1.516 | 2.305 | 2.677 | 2.620 | 2.660 |
| 2029 | 0.741 | 2.181 | 2.494 | 1.504 | 1.511 | 1.831 | 2.064 | 4.421 |
| 2071 | 1.710 | 2.337 | 1.898 | 0.892 | 1.347 | 1.908 | 1.136 | 3.404 |
| 2077 | 1.710 | 2.337 | 1.898 | 0.892 | 1.347 | 1.908 | 1.136 | 3.404 |
| 2103 | 0.537 | 1.790 | 0.727 | 0.750 | 0.329 | 1.100 | 1.239 | 0.001 |
| 2109 | 1.710 | 2.337 | 1.898 | 0.892 | 1.347 | 1.908 | 1.136 | 3.404 |
| 2138 | 0.852 | 1.789 | 3.765 | 0.686 | 3.176 | 1.591 | 1.852 | 0.001 |
| 2143 | 2.044 | 17.760 | 4.034 | 1.988 | 0.026 | 3.908 | 2.394 | 42.662 |
| 2183 | 1.088 | 5.833 | 3.519 | 1.572 | 2.641 | 4.011 | 1.695 | 7.783 |
| 2185 | 1.219 | 2.547 | 1.288 | 2.539 | 3.936 | 3.625 | 2.363 | 1.955 |
| 2190 | 1.710 | 2.337 | 1.898 | 0.892 | 1.347 | 1.908 | 1.136 | 3.404 |
| 2200 | 1.137 | 2.268 | 2.414 | 1.382 | 2.107 | 2.210 | 2.384 | 5.256 |
| 2206 | 1.000 | 3.033 | 1.912 | 1.699 | 2.147 | 2.780 | 2.155 | 2.518 |
| 2220 | 0.337 | 2.339 | 0.768 | 0.563 | 0.359 | 1.242 | 1.492 | 1.000 |
| 2224 | 1.000 | 2.266 | 2.040 | 1.000 | 2.747 | 2.620 | 1.718 | 14.145 |
| 2249 | 1.137 | 2.268 | 2.414 | 1.382 | 2.107 | 2.210 | 2.384 | 5.256 |
| 2255 | 1.243 | 1.766 | 1.547 | 0.843 | 1.000 | 1.498 | 2.122 | 4.421 |
| 2265 | 5.268 | 1.518 | 2.253 | 3.678 | 0.766 | 1.565 | 1.000 | 1.853 |
| 2267 | 0.815 | 2.497 | 3.234 | 2.275 | 2.344 | 3.596 | 5.023 | 12.124 |
| 2281 | 1.128 | 0.885 | 1.237 | 1.434 | 3.327 | 3.206 | 1.355 | 0.001 |
| 2294 | 1.058 | 2.471 | 1.583 | 1.726 | 0.506 | 1.431 | 2.632 | 5.930 |
| 2300 | 1.058 | 2.471 | 1.583 | 1.726 | 0.506 | 1.431 | 2.632 | 5.930 |
| 2307 | 0.741 | 2.181 | 2.494 | 1.504 | 1.511 | 1.831 | 2.064 | 4.421 |
| 2309 | 1.240 | 2.239 | 2.841 | 1.000 | 2.270 | 2.614 | 0.583 | 5.244 |
| 2313 | 0.633 | 2.821 | 2.976 | 1.253 | 1.675 | 3.657 | 2.284 | 8.587 |
| 2314 | 1.348 | 2.222 | 2.506 | 1.355 | 1.670 | 2.535 | 1.556 | 8.411 |
| 2316 | 0.741 | 2.181 | 2.494 | 1.504 | 1.511 | 1.831 | 2.064 | 4.421 |
| 2327 | 1.000 | 1.801 | 1.978 | 1.000 | 3.188 | 1.607 | 2.276 | 13.068 |
| 2348 | 0.790 | 3.524 | 3.377 | 2.062 | 2.123 | 1.959 | 1.626 | 1.000 |
| 2384 | 0.001 | 1.346 | 1.831 | 1.000 | 1.646 | 1.944 | 1.549 | 1.000 |

[0294] TABLE 14

| SEQ ID | | | | | |
|---|---|---|---|---|---|
| NO | P784 | P786 | P791 | P888 | P889 |
| 18 | 1.000 | 1.000 | 4.202 | 1.464 | 2.147 |
| 22 | 1.000 | 1.276 | 14.034 | 4.139 | 3.640 |
| 127 | 1.708 | 2.247 | 1.000 | 0.441 | 0.001 |
| 139 | 1.391 | 1.857 | 1.000 | 0.402 | 1.000 |
| 148 | 1.708 | 2.247 | 1.000 | 0.441 | 0.001 |
| 155 | 1.328 | 1.421 | 2.456 | 1.910 | 2.069 |
| 246 | 1.243 | 1.679 | 2.228 | 2.333 | 1.774 |
| 272 | 0.819 | 1.632 | 2.808 | 5.465 | 2.307 |
| 273 | 1000.000 | 0.758 | 1.000 | 1.000 | 1.000 |
| 279 | 1.000 | 1.000 | 1.834 | 2.776 | 1.636 |
| 298 | 1000.000 | 0.758 | 1.000 | 1.000 | 1.000 |
| 329 | 1.000 | 1.000 | 1.000 | 0.642 | 1.000 |
| 353 | 1.328 | 1.421 | 2.456 | 1.910 | 2.069 |
| 354 | 1.000 | 1.416 | 2.862 | 2.690 | 1.645 |
| 381 | 1.708 | 2.247 | 1.000 | 0.441 | 0.001 |
| 389 | 1.000 | 1.000 | 1.000 | 0.642 | 1.000 |
| 405 | 1.000 | 1.821 | 1.628 | 2.276 | 2.501 |
| 406 | 1.000 | 1.821 | 1.628 | 2.276 | 2.501 |
| 412 | 1.000 | 1.888 | 1.915 | 2.276 | 1.481 |
| 421 | 3.336 | 1.677 | 2.208 | 1.000 | 1.976 |
| 465 | 1.391 | 1.857 | 1.000 | 0.402 | 1.000 |
| 534 | 1.000 | 1.821 | 1.628 | 2.276 | 2.501 |
| 538 | 1.000 | 1.629 | 2.152 | 1.000 | 1.792 |
| 565 | 1.328 | 1.421 | 2.456 | 1.910 | 2.069 |
| 657 | 1.000 | 1.997 | 2.083 | 3.178 | 3.444 |
| 670 | 1.000 | 1.780 | 1.000 | 2.177 | 2.258 |
| 739 | 1.356 | 0.696 | 1.000 | 1.000 | 1.463 |
| 741 | 2.324 | 1.000 | 2.379 | 1.407 | 2.833 |
| 744 | 2.137 | 1.934 | 2.482 | 2.035 | 3.980 |
| 755 | 0.796 | 1.000 | 1.737 | 1.000 | 2.218 |
| 757 | 2.531 | 3.138 | 0.395 | 1.000 | 1.000 |
| 810 | 0.796 | 1.000 | 1.737 | 1.000 | 2.218 |
| 811 | 0.796 | 1.000 | 1.737 | 1.000 | 2.218 |
| 845 | 1000.000 | 1.984 | 1000.000 | 1.374 | 1.000 |
| 861 | 3.031 | 1.000 | 1.000 | 1.000 | 1.000 |
| 915 | 1.000 | 1.000 | 4.202 | 1.464 | 2.147 |
| 954 | 3.031 | 1.000 | 1.000 | 1.000 | 1.000 |
| 955 | 0.876 | 1.781 | 2.424 | 4.143 | 1.977 |
| 991 | 0.876 | 1.781 | 2.424 | 4.143 | 1.977 |
| 1035 | 1.000 | 1.780 | 1.000 | 2.177 | 2.258 |
| 1049 | 1.356 | 0.696 | 1.000 | 1.000 | 1.463 |
| 1050 | 0.876 | 1.781 | 2.424 | 4.143 | 1.977 |
| 1235 | 1.328 | 1.421 | 2.456 | 1.910 | 2.069 |
| 1292 | 1.000 | 1.000 | 1.992 | 2.144 | 1.615 |
| 1313 | 1.000 | 1.780 | 1.000 | 2.177 | 2.258 |
| 1331 | 1.290 | 1.000 | 1.000 | 1.995 | 2.203 |
| 1334 | 1.000 | 1.416 | 2.862 | 2.690 | 1.645 |
| 1418 | 1.000 | 1.000 | 4.202 | 1.464 | 2.147 |
| 1419 | 1.328 | 1.421 | 2.456 | 1.910 | 2.069 |
| 1420 | 0.816 | 1.000 | 2.196 | 2.446 | 1.518 |
| 1477 | 0.816 | 1.000 | 2.196 | 2.446 | 1.518 |
| 1554 | 1.585 | 1.889 | 2.178 | 1.806 | 1.867 |
| 1579 | 1.243 | 1.679 | 2.228 | 2.333 | 1.774 |
| 1600 | 1.328 | 1.421 | 2.456 | 1.910 | 2.069 |
| 1639 | 0.819 | 1.632 | 2.808 | 5.465 | 2.307 |
| 1657 | 2.810 | 2.638 | 1.976 | 1.491 | 2.955 |
| 1679 | 1.585 | 1.889 | 2.178 | 1.806 | 1.867 |
| 1744 | 1.253 | 1.994 | 1.874 | 3.193 | 2.663 |
| 1847 | 1.559 | 2.762 | 5.043 | 4.135 | 3.753 |
| 1877 | 1.328 | 1.421 | 2.456 | 1.910 | 2.069 |
| 1880 | 1.306 | 1.940 | 2.293 | 3.897 | 1.624 |
| 1889 | 1.328 | 1.421 | 2.456 | 1.910 | 2.069 |
| 2009 | 1.000 | 1.000 | 4.202 | 1.464 | 2.147 |
| 2023 | 1.511 | 1.357 | 1.632 | 1.891 | 1.895 |
| 2029 | 1.243 | 1.679 | 2.228 | 2.333 | 1.774 |
| 2071 | 1.000 | 1.780 | 1.000 | 2.177 | 2.258 |
| 2077 | 1.000 | 1.780 | 1.000 | 2.177 | 2.258 |
| 2103 | 0.573 | 2.678 | 1.000 | 2.507 | 3.278 |
| 2109 | 1.000 | 1.780 | 1.000 | 2.177 | 2.258 |
| 2138 | 7.866 | 1.000 | 1000.000 | 1.719 | 1.000 |
| 2143 | 2.625 | 2.744 | 4.155 | 2.105 | 4.438 |
| 2183 | 1.000 | 2.139 | 3.014 | 3.159 | 3.381 |
| 2185 | 0.796 | 1.000 | 1.737 | 1.000 | 2.218 |
| 2190 | 1.000 | 1.780 | 1.000 | 2.177 | 2.258 |
| 2200 | 1.328 | 1.421 | 2.456 | 1.910 | 2.069 |
| 2206 | 1.489 | 2.750 | 2.910 | 5.049 | 4.006 |
| 2220 | 0.419 | 3.014 | 0.575 | 2.397 | 3.558 |
| 2224 | 1.000 | 1.815 | 2.513 | 3.487 | 2.180 |
| 2249 | 1.328 | 1.421 | 2.456 | 1.910 | 2.069 |
| 2255 | 1.000 | 1.493 | 2.186 | 1.000 | 2.222 |
| 2265 | 1.267 | 3.638 | 1.623 | 5.889 | 3.339 |
| 2267 | 1.746 | 2.363 | 5.515 | 2.674 | 3.637 |
| 2281 | 2.399 | 3.587 | 3.625 | 2.567 | 2.417 |
| 2294 | 1.000 | 1.000 | 4.202 | 1.464 | 2.147 |
| 2300 | 1.000 | 1.000 | 4.202 | 1.464 | 2.147 |
| 2307 | 1.243 | 1.679 | 2.228 | 2.333 | 1.774 |
| 2309 | 0.397 | 1.000 | 1.472 | 5.315 | 2.250 |
| 2313 | 1.000 | 1.939 | 2.505 | 4.525 | 2.674 |
| 2314 | 0.819 | 1.632 | 2.808 | 5.465 | 2.307 |
| 2316 | 1.243 | 1.679 | 2.228 | 2.333 | 1.774 |
| 2327 | 1.295 | 1.658 | 2.836 | 2.766 | 2.873 |
| 2348 | 2.167 | 2.157 | 3.410 | 2.828 | 3.794 |
| 2384 | 1.352 | 1.000 | 2.727 | 0.583 | 1.000 |

[0295] TABLE 1

| SEQ ID | CLUSTER | SEQ NAME | ORIENTATION | CLONE ID | LIBRARY |
|---|---|---|---|---|---|
| 1 | 734646 | RTA22200010F.k.10.1.P.Seq | F | M00056481:62 | CH16COP |
| 2 | 400221 | RTA22200001F.a.17.1.P.Seq | F | M00042528:611 | CH15CON |
| 3 | 205329 | RTA22200006F.d.09.2.P.Seq | F | M00056020:410 | CH15CON |
| 4 | 446680 | RTA22200001F.f.07.1.P.Seq | F | M00042693:54 | CH15CON |
| 5 | 1261 | RTA22200021F.j.18.3.P.Seq | F | M00054812:15 | CH17COHLV |
| 6 | 400258 | RTA22200011F.k.23.1.P.Seq | F | M00056617:86 | CH16COP |
| 7 | 450559 | RTA22200005F.e.21.1.P.Seq | F | M00055882:16 | CH15CON |
| 8 | 450959 | RTA22200012F.e.11.1.P.Seq | F | M00056703:46 | CH16COP |
| 9 | 451794 | RTA22200007F.l.16.1.P.Seq | F | M00056247:76 | CH15CON |
| 10 | 415058 | RTA22200020F.d.11.1.P.Seq | F | M00054591:87 | CH17COHLV |
| 11 | 31506 | RTA22200012F.b.08.1.P.Seq | F | M00056670:111 | CH16COP |
| 12 | 417155 | RTA22200002F.f.10.1.P.Seq | F | M00055466:28 | CH15CON |
| 13 | 448925 | RTA22200019F.e.21.1.P.Seq | F | M00043507:45 | CH17COHLV |
| 14 | 11329 | RTA22200006F.d.10.2.P.Seq | F | M00056020:47 | CH15CON |
| 15 | 650422 | RTA22200001F.n.14.1.P.Seq | F | M00042911:83 | CH15CON |
| 16 | 6863 | RTA22200229F.f.13.1.P.Seq | F | M00006967:25 | CH02COH |
| 17 | 449690 | RTA22200002F.g.18.1.P.Seq | F | M00055495:45 | CH15CON |
| 18 | 724616 | RTA22200016F.j.23.1.P.seq | F | M00057236:86 | CH16COP |
| 19 | 549722 | RTA22200025F.m.01.2.P.Seq | F | M00055383:24 | CH17COHLV |
| 20 | 549722 | RTA22200025F.l.24.1.P.Seq | F | M00055383:24 | CH17COHLV |
| 21 | 448110 | RTA22200018F.m.04.1.P.Seq | F | M00043354:31 | CH17COHLV |
| 22 | 515631 | RTA22200010F.j.14.1.P.Seq | F | M00056434:38 | CH16COP |
| 23 | 11881 | RTA22200233F.k.04.1.P.Seq | F | M00008099:78 | CH03MAH |
| 24 | 650856 | RTA22200012F.n.24.1.P.Seq | F | M00056772:14 | CH16COP |
| 25 | 449701 | RTA22200012F.f.21.1.P.Seq | F | M00056710:89 | CH16COP |
| 26 | 651073 | RTA22200007F.l.06.1.P.Seq | F | M00056243:710 | CH15CON |
| 27 | 10340 | RTA22200234F.b.07.1.P.Seq | F | M00022189:23 | CH03MAH |
| 28 | 648310 | RTA22200007F.m.04.1.P.Seq | F | M00056252:88 | CH15CON |
| 29 | 730336 | RTA22200013F.l.02.1.P.Seq | F | M00056879:811 | CH16COP |
| 30 | 3060 | RTA22200018F.b.10.1.P.Seq | F | M00042444:88 | CH17COHLV |
| 31 | 453016 | RTA22200010F.l.06.1.P.Seq | F | M00056485:212 | CH16COP |
| 32 | 508931 | RTA22200024F.i.13.1.P.Seq | F | M00055209:410 | CH17COHLV |
| 33 | 185461 | RTA22200242F.b.06.1.P.Seq | F | M00026975:23 | CH04MAL |
| 34 | 452530 | RTA22200015F.n.11.1.P.Seq | F | M00057131:21 | CH16COP |
| 35 | 448925 | RTA22200026F.d.02.1.P.Seq | F | M00055419:71 | CH17COHLV |
| 36 | 1013 | RTA22200005F.m.06.1.P.Seq | F | M00055945811 | CH15CON |
| 37 | 6545 | RTA22200241F.d.23.1.P.Seq | F | M00026879:410 | CH04MAL |
| 38 | 449891 | RTA22200001F.b.23.1.P.Seq | F | M00042540:85 | CH15CON |
| 39 | 4045 | RTA22200227F.n.06.1.P.Seq | F | M00006740:71 | CH02COH |
| 40 | 404475 | RTA22200002F.b.23.1.P.Seq | F | M00055438:810 | CH15CON |
| 41 | 650297 | RTA22200001F.n.10.1.P.Seq | F | M00042909:74 | CH15CON |
| 42 | 650493 | RTA22200005F.n.03.1.P.Seq | F | M00055959:112 | CH15CON |
| 43 | 644884 | RTA22200007F.k.04.1.P.Seq | F | M00056232:712 | CH15CON |
| 44 | 452212 | RTA22200021F.k.21.3.P.Seq | F | M00054821:311 | CH17COHLV |
| 45 | 402727 | RTA22200010F.n.09.1.P.Seq | F | M00056505:82 | CH16COP |
| 46 | 645194 | RTA22200003F.m.24.1.P.Seq | F | M00055709:79 | CH15CON |
| 47 | 447501 | RTA22200013F.f.14.1.P.Seq | F | M00056839:72 | CH16COP |
| 48 | 556326 | RTA22200003F.o.06.1.P.Seq | F | M00055723:28 | CH15CON |
| 49 | 447035 | RTA22200001F.e.15.1.P.Seq | F | M00042570:82 | CH15CON |
| 50 | 2551 | RTA22200012F.o.07.1.P.Seq | F | M00056774:12 | CH16COP |
| 51 | 736154 | RTA22200010F.i.17.1.P.Seq | F | M00056424:110 | CH16COP |
| 52 | 452028 | RTA22200018F.k.24.1.P.Seq | F | M00043345:33 | CH17COHLV |
| 53 | 447441 | RTA22200001F.m.13.1.P.Seq | F | M00042902:34 | CH15CON |
| 54 | 11028 | RTA22200230F.g.12.1.P.Seq | F | M0007151:211 | CH02COH |
| 55 | 640974 | RTA22200002F.B.07.1.P.Seq | F | M00055429:85 | CH15CON |
| 56 | 555103 | RTA22200022F.m.11.1.P.Seq | F | M00054973:110 | CH17COHLV |
| 57 | 446789 | RTA22200001F.c.12.1.P.Seq | F | M00042547:62 | CH15CON |
| 58 | 644884 | RTA22200007F.k.04.2.P.Seq | F | M00056232:712 | CH15CON |
| 59 | 9029 | RTA22200222F.g.08.1.P.Seq | F | M00003792:111 | CH01COH |
| 60 | 419255 | RTA22200007F.l.14.2.P.Seq | F | M00056246:77 | CH15CON |
| 61 | 4309 | RTA22200225F.j.15.1.P.Seq | F | M00005491:23 | CH02COH |
| 62 | 554069 | RTA22200022F.p.16.1.P.Seq | F | M00055008:28 | CH17COHLV |
| 63 | 4330 | RTA22200227F.i.16.1.P.Seq | F | M00006686:27 | CH02COH |
| 64 | 644903 | RTA22200015F.i.22.1.P.Seq | F | M00057103:511 | CH16COP |
| 65 | 549395 | RTA22200024F.d.04.1.P.Seq | F | M00055163:32 | CH17COHLV |
| 66 | 4974 | RTA22200225F.k.17.1.P.Seq | F | M00005500:53 | CH02COH |
| 67 | 447466 | RTA22200006F.h.03.0.P.Seq | F | M00056053:19 | CH15CON |
| 68 | 645073 | RTA22200004F.o.13.1.P.Seq | F | M00055829:79 | CH15CON |
| 69 | 447978 | RTA22200025F.i.14.1.P.Seq | F | M00055361:81 | CH17COHLV |
| 70 | 607430 | RTA22200004F.p.22.1.P.Seq | F | M00055841:45 | CH15CON |
| 71 | 556198 | RTA22200014F.h.02.2.P.Seq | F | M00056972:65 | CH16COP |
| 72 | 450323 | RTA22200018F.l.23.1.P.Seq | F | M00043352:59 | CH17COHLV |
| 73 | 21205 | RTA22200249F.g.01.1.P.Seq | F | M00027660:53 | CH04MAL |
| 74 | 561109 | RTA22200011F.m.10.1.P.Seq | F | M00056631:43 | CH16COP |
| 75 | 446673 | RTA22200001F.a.14.1.P.Seq | F | M00042525:51 | CH15CON |
| 76 | 456026 | RTA22200004F.m.04.1.P.Seq | F | M00055817:38 | CH15CON |
| 77 | 449142 | RTA22200009F.c.13.2.P.Seq | F | M00042513:112 | CH16COP |
| 78 | 5830 | RTA22200010F.c.23.1.P.Seq | F | M00056370:72 | CH16COP |
| 79 | 554109 | RTA22200026F.g.07.1.P.Seq | F | M00055484:77 | CH17COHLV |
| 80 | 595506 | RTA22200010F.l.16.1.P.Seq | F | M00056491:78 | CH16COP |
| 81 | 453981 | RTA22200010F.p.11.1.P.Seq | F | M00056519:81 | CH16COP |
| 82 | 642461 | RTA22200016F.j.11.1.P.Seq | F | M00057233:54 | CH16COP |
| 83 | 556198 | RTA22200014F.h.02.1.P.Seq | F | M00056972:65 | CH16COP |
| 84 | 2082 | RTA22200009F.g.21.1.P.Seq | F | M00042801:26 | CH16COP |
| 85 | 549435 | RTA22200007F.j.06.1.P.Seq | F | M00056223:73 | CH15CON |
| 86 | 2286 | RTA22200230F.j.03.1.P.Seq | F | M00007177:511 | CH02COH |
| 87 | 2737 | RTA22200023F.d.17.1.P.Seq | F | M00055039:52 | CH17COHLV |
| 88 | 728115 | RTA22200013F.f.13.1.P.Seq | F | M00056839:71 | CH16COP |
| 89 | 650856 | RTA22200012F.o.01.1.P.Seq | F | M00056772:14 | CH16COP |
| 90 | 650476 | RTA22200005F.g.21.1.P.Seq | F | M00055891:14 | CH15CON |
| 91 | 535208 | RTA22200005F.b.02.1.P.Seq | F | M00055852:17 | CH15CON |
| 92 | 733849 | RTA22200011F.m.24.1.P.Seq | F | M00056638:48 | CH16COP |
| 93 | 447978 | RTA22200009F.g.19.1.P.Seq | F | M00042800:13 | CH16COP |
| 94 | 729483 | RTA22200012F.i.12.1.P.Seq | F | M00056728:45 | CH16COP |
| 95 | 12018 | RTA22200249F.e.19.1.P.Seq | F | M00027641:11 | CH04MAL |
| 96 | 4747 | RTA22200227F.d.18.1.P.Seq | F | M00006630:311 | CH02COH |
| 97 | 4747 | RTA22200225F.a.23.1.P.Seq | F | M00005415:612 | CH02COH |
| 98 | 185577 | RTA22200240F.i.02.1.P.Seq | F | M00023409:78 | CH04MAL |
| 99 | 4126 | RTA22200231F.m.17.1.P.Seq | F | M00007990:43 | CH03MAH |
| 100 | 11456 | RTA22200226F.l.08.1.P.Seq | F | M00005765:67 | CH02COH |
| 101 | 729851 | RTA22200010F.o.03.1.P.Seq | F | M00056508:210 | CH16COP |
| 102 | 449849 | RTA22200019F.b.07.1.P.Seq | F | M00043394:26 | CH17COHLV |
| 103 | 2490 | RTA22200237F.e.17.1.P Seq | F | M00022720:111 | CH03MAH |
| 104 | 549041 | RTA22200021F.h.21.3.P.Seq | F | M00054779:67 | CH17COHLV |
| 105 | 11881 | RTA22200237F.i.01.1.P.Seq | F | M00022750:17 | CH03MAH |
| 106 | 724296 | RTA22200014F.o.10.1.P.Seq | F | M00057025:18 | CH16COP |
| 107 | 726173 | RTA22200014F.o.01.1.P.Seq | F | M00057023:89 | CH16COP |
| 108 | 2423 | RTA22200236F.h.20.1.P.Seq | F | M00022641:62 | CH03MAH |
| 109 | 556250 | RTA22200014F.l.09.1.P.Seq | F | M00057005:31 | CH16COP |
| 110 | 643594 | RTA22200005F.b.01.1.P.Seq | F | M00055851:612 | CH15CON |
| 111 | 11881 | RTA22200237F.h.24.1.P.Seq | F | M00022750:17 | CH03MAH |
| 112 | 7436 | RTA22200237F.j.11.1.P.Seq | F | M00022791:611 | CH03MAH |
| 113 | 2110 | RTA22200235F.a.19.1.P.Seq | F | M00022415:26 | CH03MAH |
| 114 | 10340 | RTA22200235F.e.13.1.P.Seq | F | M00022457:75 | CH03MAH |
| 115 | 643594 | RTA22200005F.a.24.1.P.Seq | F | M00055851:612 | CH15CON |
| 116 | 447035 | RTA22200005F.d.11.1.P.Seq | F | M00055872:412 | CH15CON |
| 117 | 402707 | RTA22200007F.c.21.1.P.Seq | F | M00056160:18 | CH15CON |
| 118 | 645799 | RTA22200014F.d.22.1.P.Seq | F | M00056952:84 | CH16COP |
| 119 | 171511 | RTA22200014F.c.05.1.P.Seq | F | M00056939:22 | CH16COP |
| 120 | 451607 | RTA22200014F.h.15.2.P.Seq | F | M00056976:610 | CH16COP |
| 121 | 3138 | RTA22200242F.k.08.1.P.Seq | F | M00027039:59 | CH04MAL |
| 122 | 2988 | RTA22200229F.h.11.1.P.Seq | F | M00006987:711 | CH02COH |
| 123 | 447327 | RTA22200014F.g.22.1.P.Seq | F | M00056969:21 | CH16COP |
| 124 | 561734 | RTA22200014F.f.10.1.P.Seq | F | M00056961:712 | CH16COP |
| 125 | 454999 | RTA22200009F.a.13.2.P.Seq | F | M00042432:810 | CH16COP |
| 126 | 185652 | RTA22200242F.i.12.1.P.Seq | F | M00027028:37 | CH04MAL |
| 127 | 6725 | RTA22200232F.d.17.1.P.Seq | F | M00021947:36 | CH03MAH |
| 128 | 726644 | RTA22200013F.i.19.1.P.Seq | F | M00056864:89 | CH16COP |
| 129 | 11012 | RTA22200227F.n.21.1.P.Seq | F | M00006745:12 | CH02COH |
| 130 | 726377 | RTA22200013F.i.03.1.P.Seq | F | M00056860:612 | CH16COP |
| 131 | 735326 | RTA22200013F.l.19.1.P.Seq | F | M000568860:311 | CH16COP |
| 132 | 650845 | RTA22200013F.l.13.1.P.Seq | F | M00056884:36 | CH16COP |
| 133 | 9048 | RTA22200222F.l.18.1.P.Seq | F | M00004101:81 | CH01COH |
| 134 | 732254 | RTA22200012F.b.15.1.P.Seq | F | M00056674:84 | CH16COP |
| 135 | 452052 | RTA22200013F.i.16.1.P.Seq | F | M00056863:53 | CH16COP |
| 136 | 554079 | RTA22200012F.j.17.1.P.Seq | F | M00056735:28 | CH16COP |
| 137 | 9049 | RTA22200222F.i.05.1.P.Seq | F | M00003948:212 | CH01COH |
| 138 | 1307 | RTA22200244F.n.16.1.P.Seq | F | M00027222:39 | CH04MAL |
| 139 | 139730 | RTA22200242F.g.11.1.P.Seq | F | M00027016:76 | CH04MAL |
| 140 | 7750 | RTA22200241F.f.24.1.P.Seq | F | M00026899:711 | CH04MAL |
| 141 | 8050 | RTA22200227F.p.20.1.P.Seq | F | M00006761:49 | CH02COH |
| 142 | 725222 | RTA22200013F.k.24.1.P.Seq | F | M00056879:55 | CH16COP |
| 143 | 3275 | RTA22200235F.j.22.2.P.Seq | F | M00022516:59 | CH03MAH |
| 144 | 7424 | RTA22200235F.c.12.1.P.Seq | F | M00022430:44 | CH03MAH |
| 145 | 8953 | RTA22200241F.c.05.1.P.Seq | F | M00026866:88 | CH04MAL |
| 146 | 8966 | RTA22200243F.c.04.1.P.Seq | F | M00027088:86 | CH04MAL |
| 147 | 530883 | RTA22200013F.i.22.1.P.Seq | F | M00056866:55 | CH16COP |
| 148 | 6725 | RTA22200238F.l.09.1.P.Seq | F | M00022973:78 | CH03MAH |
| 149 | 4439 | RTA22200222F.m.24.1.P.Seq | F | M00004167:411 | CH01COH |
| 150 | 648472 | RTA22200012F.g.07.1.P.Seq | F | M00056712:17 | CH16COP |
| 151 | 735346 | RTA22200011F.l.03.1.P.Seq | F | M00056618:22 | CH16COP |
| 152 | 732121 | RTA22200011F.j.05.1.P.Seq | F | M00056600:87 | CH16COP |
| 153 | 650337 | RTA22200005F.h.15.1.P.Seq | F | M00055900.25 | CH15CON |
| 154 | 533588 | RTA22200005F.p.05.i.P.Seq | F | M00055981:17 | CH15CON |
| 155 | 649667 | RTA22200007F.p.20.1.P.Seq | F | M00056290:82 | CH15CON |
| 156 | 394436 | RTA22200015F.p.07.1.P.Seq | F | M00057145:45 | CH16COP |
| 157 | 649354 | RTA22200007F.h.13.1.P.Seq | F | M00056210:53 | CH15CON |
| 158 | 2022 | RTA22200240F.e.10.1.P.Seq | F | M00023347:312 | CH04MAL |
| 159 | 561359 | RTA22200003F.m.08.1.P.Seq | F | M00055703:26 | CH15CON |
| 160 | 76O7 | RTA22200225F.m.20.1.P.Seq | F | M00005520:512 | CH02COH |
| 161 | 7750 | RTA22200242F.f.06.1.P.Seq | F | M00027006:81 | CH04MAL |
| 162 | 410554 | RTA22200012F.i.21.1.P.Seq | F | M00056729:812 | CH16COP |
| 163 | 2315 | RTA22200230F.e.24.1.P.Seq | F | M00007135:211 | CH02COH |
| 164 | 561734 | RTA22200014F.f.10.2.P.Seq | F | M00056961:712 | CH16COP |
| 165 | 4420 | RTA22200229F.f.02.1.P.Seq | F | M00006964:111 | CH02COH |
| 166 | 559663 | RTA22200012F.d.17.1.P.Seq | F | M00056697:53 | CH16COP |
| 167 | 7082 | RTA22200235F.p.01.2.P.Seq | F | M00022565:15 | CH03MAH |
| 168 | 2315 | RTA22200230F.f.01.1.P.Seq | F | M00007135:211 | CH02COH |
| 169 | 650472 | RTA22200012F.j.21.1.P.Seq | F | M00056737:77 | CH16COP |
| 170 | 6482 | RTA22200230F.a.10.1.P.Seq | F | M00007096:51 | CH02COH |
| 171 | 4584 | RTA22200230F.a.09.1.P.Seq | F | M00007096:52 | CH02COH |
| 172 | 453846 | RTA22200012F.b.14.1.P.Seq | F | M00056674:55 | CH16COP |
| 173 | 650820 | RTA22200011F.p.05.1.P.Seq | F | M0005665:83 | CH16COP |
| 174 | 642906 | RTA22200005F.g.06.1.P.Seq | F | M00055887:36 | CH15CON |
| 175 | 448805 | RTA22200005F.i.23.1.P.Seq | F | M00055912:35 | CH15CON |
| 176 | 649667 | RTA22200006F.k.18.2.P.Seq | F | M00056082:66 | CH15CON |
| 177 | 735786 | RTA22200012F.m.12.1.P.Seq | F | M00056758:35 | CH16COP |
| 178 | 121457 | RTA22200012F.p.18.1.P.Seq | F | M00056785:68 | CH16COP |
| 179 | 372960 | RTA22200012F.m.06.1.P.Seq | F | M00056756:28 | CH16COP |
| 180 | 120049 | RTA22200012F.j.10.1.P.Seq | F | M00056733:49 | CH16COP |
| 181 | 648996 | RTA22200006F.p.20.2.P.Seq | F | M00056136:11 | CH15CON |
| 182 | 3765 | RTA22200226F.a.16.1.P.Seq | F | M00005589:67 | CH02COH |
| 183 | 462642 | RTA22200008F.e.08.1.P.Seq | F | M00056342:75 | CH15CON |
| 184 | 727181 | RTA22200016F.f.18.1.P.Seq | F | M00057208:12 | CH16COP |
| 185 | 649259 | RTA22200006F.k.06.2.P.Seq | F | M00056079:412 | CH15CON |
| 186 | 649717 | RTA22200007F.e.08.1.P.Seq | F | M00056180:89 | CH15CON |
| 187 | 736860 | RTA22200009F.p.24.1.P.Seq | F | M00056351:46 | CH16COP |
| 188 | 729175 | RTA22200012F.o.05.1.P.Seq | F | M00056773:811 | CH16COP |
| 189 | 642906 | RTA22200005F.f.14.1.P.Seq | F | M00055884:15 | CH15CON |
| 190 | 4420 | RTA22200232F.l.13.1.P.Seq | F | M00022123:45 | CH03MAH |
| 191 | 2420 | RTA22200226F.c.12.1.P.Seq | F | M00005619:19 | CH02COH |
| 192 | 648109 | RTA22200015F.o.03.1.P.Seq | F | M00057135:84 | CH16COP |
| 193 | 2334 | RTA22200011F.p.20.1.P.Seq | F | M00056661:19 | CH16COP |
| 194 | 639705 | RTA22200003F.o.14.1.P.Seq | F | M00055724:49 | CH15CON |
| 195 | 551907 | RTA22200003F.n.12.1.P.Seq | F | M00055717:64 | CH15CON |
| 196 | 561382 | RTA22200003F.m.20.1.P.Seq | F | M00055706:71 | CH15CON |
| 197 | 595506 | RTA22200022F.a.01.1.P.Seq | F | M00054866:77 | CH17COHLV |
| 198 | 499424 | RTA22200013F.f.16.1.P.Seq | F | M00056839:61 | CH16COP |
| 199 | 735477 | RTA22200016F.f.08.1.P.Seq | F | M00057203:56 | CH16COP |
| 200 | 734370 | RTA22200013F.g.21.1.P.Seq | F | M00056848:37 | CH16COP |
| 201 | 779 | RTA22200230F.c.07.1.P.Seq | F | M00007112:112 | CH02COH |
| 202 | 649143 | RTA22200007F.o.24.1.P.Seq | F | M00056283:52 | CH15CON |
| 203 | 489 | RTA22200012F.m.16.1.P.Seq | F | M00056759:611 | CH16COP |
| 204 | 2994 | RTA22200229F.k.24.1.P.Seq | F | M00007028:34 | CH02COH |
| 205 | 2994 | RTA22200229F.l.01.1.P.Seq | F | M00007028:34 | CH02COH |
| 206 | 11147 | RTA22200227F.g.12.1.P.Seq | F | M00006664:29 | CH02COH |
| 207 | 549395 | RTA22200021F.d.19.2.P.Seq | F | M00054745:13 | CH17COHLV |
| 208 | 559806 | RTA22200022F.h.11.1.P.Seq | F | M00054937:63 | CH17COHLV |
| 209 | 452238 | RTA22200009F.k.17.2.P.Seq | F | M00042838:511 | CH16COP |
| 210 | 225914 | RTA22200023F.j.18.1.P.Seq | F | M00055075:85 | CH17COHLV |
| 211 | 463480 | RTA22200022F.p.18.1.P.Seq | F | M00055008:29 | CH17COHLV |
| 212 | 184725 | RTA22200007F.o.17.1.P.Seq | F | M00056281:54 | CH15CON |
| 213 | 557401 | RTA22200023F.g.22.1.P.Seq | F | M00055056:26 | CH17COHLV |
| 214 | 455155 | RTA22200003F.f.04.1.P.Seq | F | M00055633:711 | CH15CON |
| 215 | 551117 | RTA22200023F.p.03.1.P.Seq | F | M00055131:210 | CH17COHLV |
| 216 | 7659 | RTA22200231F.g.16.1.P.Seq | F | M00007964:71 | CH03MAH |
| 217 | 729295 | RTA22200017F.b.14.1.P.Seq | F | M00057306:87 | CH16COP |
| 218 | 450429 | RTA22200007F.f.20.1.P.Seq | F | M00056195:38 | CH15CON |
| 219 | 450148 | RTA22200022F.f.21.1.P.Seq | F | M00054927:58 | CH17COHLV |
| 220 | 380412 | RTA22200006F.c.23.2.P.Seq | F | M00056016:46 | CH15CON |
| 221 | 446614 | RTA22200001F.e.01.1.P.Seq | F | M00042563:52 | CH15CON |
| 222 | 555911 | RTA22200023F.f.21.i.P.Seq | F | M00055050:74 | CH17COHLV |
| 223 | 450828 | RTA22200022F.g.23.1.P.Seq | F | M00054935:74 | CH17COHLV |
| 224 | 28 | RTA22200006F.a.17.2.P.Seq | F | M00055999:710 | CH15CON |
| 225 | 446450 | RTA22200001F.h.15.1.P.Seq | F | M00042717:44 | CH15CON |
| 226 | 452026 | RTA22200010F.g.18.1.P.Seq | F | M0005611:54 | CH16COP |
| 227 | 643594 | RTA22200006F.a.18.2.P.Seq | F | M00055999:76 | CH15CON |
| 228 | 1905 | RTA22200012F.o.14.1.P.Seq | F | M00056775:38 | CH16COP |
| 229 | 651073 | RTA22200007F.l.06.2.P.Seq | F | M00056243:710 | CH15CON |
| 230 | 553705 | RTA22200006F.a.23.2.P.Seq | F | M00056001:27 | CH15CON |
| 231 | 521840 | RTA22200004F.j.15.1.P.Seq | F | M00055802:84 | CH15CON |
| 232 | 648689 | RTA22200006F.o.07.2.P.Seq | F | M00056111:82 | CH15CON |
| 233 | 447858 | RTA22200022F.d.10.1.P.Seq | F | M00054895:49 | CH17COHLV |
| 234 | 556198 | RTA22200010F.d.10.1.P.Seq | F | M00056374:82 | CH16COP |
| 235 | 394436 | RTA22200003F.i.09.1.P.Seq | F | M00055662:14 | CH15CON |
| 236 | 639651 | RTA22200003F.g.12.1.P.Seq | F | M00055647:24 | CH15CON |
| 237 | 499424 | RTA22200010F.d.18.1.P.Seq | F | M00056382:82 | CH16COP |
| 238 | 468109 | RTA22200001F.p.12.1.P.Seq | F | M00054915:57 | CH15CON |
| 239 | 185701 | RTA22200248F.g.23.1.P.Seq | F | M00027561:34 | CH04MAL |
| 240 | 451811 | RTA22200006F.h.04.2.P.Seq | F | M00056053:412 | CH15CON |
| 241 | 730670 | RTA22200009F.m.14.1.P.Seq | F | M00042850:34 | CH16COP |
| 242 | 172013 | RTA22200021F.l.15.3.P.Seq | F | M00054826:310 | CH17COHLV |
| 243 | 449142 | RTA22200001F.f.10.1.P.Seq | F | M00042694:52 | CH15CON |
| 244 | 446964 | RTA22200001F.h.23.1.P.Seq | F | M00042721:77 | CH15CON |
| 245 | 414739 | RTA22200022F.i.16.1.P.Seq | F | M00054945:77 | CH17COHLV |
| 246 | 641124 | RTA22200004F.k.12.1.P.Seq | F | M00055805:37 | CH15CON |
| 247 | 555702 | RTA22200022F.i.10.1.P.Seq | F | M00054949:53 | CH17COHLV |
| 248 | 549435 | RTA22200019F.p.14.1.P.Seq | F | M00054561:56 | CH17COHLV |
| 249 | 643954 | RTA22200002F.d.19.1.P.Seq | F | M00055451:711 | CH15CON |
| 250 | 5984 | RTA22200026F.d.05.1.P.Seq | F | M00055420:56 | CH17COHLV |
| 251 | 560526 | RTA22200022F.f.10.1.P.Seq | F | M00054910:76 | CH17COHLV |
| 252 | 411113 | RTA22200023F.a.16.1.P.Seq | F | M00055017:111 | CH17COHLV |
| 253 | 7607 | RTA22200004F.b.13.1.P.Seq | F | M00055744:69 | CH15CON |
| 254 | 559409 | RTA22200019F.o.07.1.P.Seq | F | M00054551:73 | CH17COHLV |
| 255 | 650053 | RTA22200002F.p.11.1.P.Seq | F | M00055560:62 | CH15CON |
| 256 | 448511 | RTA22200009F.f.03.1.P.Seq | F | M00042777:46 | CH16COP |
| 257 | 642142 | RTA22200016F.o.20.1.P.Seq | F | M00057277:510 | CH16COP |
| 258 | 470462 | RTA22200006F.b.14.2.P.Seq | F | M00056005:34 | CH15CON |
| 259 | 431601 | RTA22200004F.d.07.1.P.Seq | F | M00055763:56 | CH15CON |
| 260 | 421431 | RTA22200001F.g.16.1.P.Seq | F | M00042704:52 | CH15CON |
| 261 | 284586 | RTA22200002F.d.17.1.P.Seq | F | M00055451:67 | CH15CON |
| 262 | 556198 | RTA22200022F.l.06.1.P.Seq | F | M00054963:84 | CH17COHLV |
| 263 | 431601 | RTA22200004F.j.04.1.P.Seq | F | M00055800:48 | CH15CON |
| 264 | 449891 | RTA22200002F.n.21.1.P.Seq | F | M00055548:64 | CH15CON |
| 265 | 556561 | RTA22200022F.p.01.1.P.Seq | F | M00054997:212 | CH17COHLV |
| 266 | 554188 | RTA22200022F.o.20.1.P.Seq | F | M00054996:39 | CH17COHLV |
| 267 | 3247 | RTA22200006F.a.22.2.P.Seq | F | M00056001:26 | CH15CON |
| 268 | 546705 | RTA22200022F.k.20.1.P.Seq | F | M00054959:311 | CH17COHLV |
| 269 | 560984 | RTA22200022F.p.02.1.P.Seq | F | M00054997:83 | CH17COHLV |
| 270 | 455820 | RTA22200006F.g.03.2.P.Seq | F | M00056045:81 | CH17COHLV |
| 271 | 643129 | RTA22200006F.n.12.2.P.Seq | F | M06056103:412 | CH15CON |
| 272 | 454653 | RTA22200023F.o.20.1.P.Seq | F | M00055128:210 | CH17COHLV |
| 273 | 456549 | RTA22200002F.k.01.1.P.Seq | F | M00055522:32 | CH15CON |
| 274 | 454806 | RTA22200004F.n.04.1.P.Seq | F | M00055822:84 | CH15CON |
| 275 | 724296 | RTA22200014F.o.10.2.P.Seq | F | M00057025:18 | CH16COP |
| 276 | 559280 | RTA22200015F.j.19.1.P.Seq | F | M00057106:26 | CH16COP |
| 277 | 171511 | RTA22200014F.c.05.2.P.Seq | F | M00056939:22 | CH16COP |
| 278 | 644242 | RTA22200002F.o.14.1.P.Seq | F | M00055553:84 | CH15CON |
| 279 | 734370 | RTA22200016F.j.07.1.P.Seq | F | M00057232:46 | CH16COP |
| 280 | 639459 | RTA22200002F.i.18.1.P.Seq | F | M00055512:76 | CH15CON |
| 281 | 641679 | RTA22200003F.d.20.1.P.Seq | F | M00055613:52 | CH15CON |
| 282 | 644611 | RTA22200002F.i.10.1.P.Seq | F | M00055509:89 | CH15CON |
| 283 | 550038 | RTA22200021F.i.16.3.P.Seq | F | M00054802:72 | CH17COHLV |
| 284 | 452567 | RTA22200002F.J.12.1.P.Seq | F | M00055519:36 | CH15CON |
| 285 | 411113 | RTA22200024F.f.03.1.P.Seq | F | M00055185:21 | CH17COHLV |
| 286 | 650749 | RTA22200002F.d.18.1.P.Seq | F | M00055451:611 | CH15CON |
| 287 | 558899 | RTA22200026F.d.12.1.P.Seq | F | M00055421:44 | CH17COHLV |
| 288 | 452986 | RTA22200002F.a.13.1.P.Seq | F | M00055426:22 | CH15CON |
| 289 | 393197 | RTA22200015F.k.01.1.P.Seq | F | M00057108:59 | CH16COP |
| 290 | 499424 | RTA22200024F.e.10.1.P.Seq | F | M00055179:42 | CH17COHLV |
| 291 | 21669 | RTA22200025F.m.07.2.P.Seq | F | M00055384:13 | CH17COHLV |
| 292 | 640590 | RTA22200004F.h.21.1.P.Seq | F | M00055794:711 | CH15CON |
| 293 | 549936 | RTA22200024F.c.10.1.P.Seq | F | M00055157:311 | CH17COHLV |
| 294 | 448770 | RTA22200016F.c.17.1.P.Seq | F | M00057174:712 | CH16COP |
| 295 | 559280 | RTA22200015F.h.14.1.P.Seq | F | M00057093:69 | CH16COP |
| 296 | 648934 | RTA22200003F.c.10.1.P.Seq | F | M00055591:81 | CH15CON |
| 297 | 452685 | RTA22200004F.p.06.1.P.Seq | F | M00055838:412 | CH15CON |
| 298 | 456549 | RTA22200002F.j.24.1.P.Seq | F | M00055522:32 | CH15CON |
| 299 | 446614 | RTA22200001F.d.24.1.P.Seq | F | M00042563:52 | CH15CON |
| 300 | 559280 | RTA22200024F.d.18.1.P.Seq | F | M00055170:52 | CH17COHLV |
| 301 | 446673 | RTA22200015F.c.01.1.P.Seq | F | M00057055:78 | CH16COP |
| 302 | 562550 | RTA22200004F.n.17.1.P.Seq | F | M00055826:64 | CH15CON |
| 303 | 467288 | RTA22200002F.h.16.1.P.Seq | F | M00055500:25 | CH15CON |
| 304 | 463824 | RTA22200004F.n.10.1.P.Seq | F | M00055823:43 | CH15CON |
| 305 | 393197 | RTA22200015F.j.24.1.P.Seq | F | M00057108:59 | CH16COP |
| 306 | 407077 | RTA22200015F.j.22.1.P.Seq | F | M00057108:64 | CH16COP |
| 307 | 499424 | RTA22200018F.h.13.1.P.Seq | F | M00043317:81 | CH17COHLV |
| 308 | 554500 | RTA22200021F.o.20.2.P.Seq | F | M00054857:512 | CH17COHLV |
| 309 | 730143 | RTA22200015F.k.14.1.P.Seq | F | M00057112:29 | CH16COP |
| 310 | 595506 | RTA22200015F.c.21.1.P.Seq | F | M00057061:44 | CH16COP |
| 311 | 2334 | RTA22200016F.k.13.1.P.Seq | F | M00057242:85 | CH16COP |
| 312 | 647444 | RTA22200002F.k.22.1.P.Seq | F | M00055527:711 | CH15CON |
| 313 | 380291 | RTA22200008F.a.03.1.P Seq | F | M00056292:55 | CH15CON |
| 314 | 644849 | RTA22200016F.a.22.1.P.Seq | F | M00057162:37 | CH16COP |
| 315 | 449457 | RTA22200018F.g.23.1.P.Seq | F | M00043314:84 | CH17COHLV |
| 316 | 446673 | RTA22200015F.b.24.1.P.Seq | F | M00057055:78 | CH16COP |
| 317 | 549069 | RTA22200020F.e.05.1.P.Seq | F | M00054596:27 | CH17COHLV |
| 318 | 728884 | RTA22200015F.d.02.1.P.Seq | F | M00057063:38 | CH16COP |
| 319 | 415058 | RTA22200020F.f.03.1.P.Seq | F | M00054605:41 | CH17COHLV |
| 320 | 553955 | RTA22200020F.e.20.1.P.Seq | F | M00054602:42 | CH17COHLV |
| 321 | 455820 | RTA22200018F.i.16.1.P.Seq | F | M00043323:44 | CH17COHLV |
| 322 | 549617 | RTA22200020F.f.20.1.P.Seq | F | M00054611:62 | CH17COHLV |
| 323 | 449831 | RTA22200018F.d.22.1.P.Seq | F | M00042518:16 | CH17COHLV |
| 324 | 451580 | RTA22200018F.b.09.1.P.Seq | F | M00042444:75 | CH17COHLV |
| 325 | 558899 | RTA22200025F.f.09.1.P.Seq | F | M00055325:212 | CH17COHLV |
| 326 | 562292 | RTA22200025F.j.10.1.P.Seq | F | M00055368:26 | CH17COHLV |
| 327 | 5830 | RTA22200011F.d.11.1.P.Seq | F | M00056552:110 | CH16COP |
| 328 | 8953 | RTA22200248F.p.09.1.P.Seq | F | M00027608:87 | CH04MAL |
| 329 | 8012 | RTA22200233F.i.02.1.P.Seq | F | M00008089:59 | CH03MAH |
| 330 | 185718 | RTA22200250F.f.15.1.P.Seq | F | M00027829:42 | CH04MAL |
| 331 | 729851 | RTA22200011F.b.18.1.P.Seq | F | M00056537:85 | CH16COP |
| 332 | 185597 | RTA22200249F.a.20.1.P.Seq | F | M00027616:712 | CH04MAL |
| 333 | 9887 | RTA22200234F.h.14.1.P.Seq | F | M00022253:53 | CH03MAH |
| 334 | 725825 | RTA22200011F.c.16.1.P.Seq | F | M00056547:34 | CH16COP |
| 335 | 6545 | RTA22200249F.e.12.1.P.Seq | F | M00027639:511 | CH04MAL |
| 336 | 21205 | RTA22200249F.f.24.1.P.Seq | F | M00027660:53 | CH04MAL |
| 337 | 8867 | RTA22200234F.j.23.1.P.Seq | F | M00022280:711 | CH03MAH |
| 338 | 729295 | RTA22200010F.m.09.1.P.Seq | F | M00056499:65 | CH16COP |
| 339 | 730430 | RTA22200010F.h.08.1.P.Seq | F | M00056416:212 | CH16COP |
| 340 | 7072 | RTA22200233F.h.20.1.P.Seq | F | M00008085:39 | CH03MAH |
| 341 | 730533 | RTA22200010F.n.17.1.P.Seq | F | M00056506:712 | CH16COP |
| 342 | 9121 | RTA22200224F.g.11.1.P.Seq | F | M00005312:410 | CH02COH |
| 343 | 11131 | RTA22200224F.c.08.1.P.Seq | F | M00004852:14 | CH02COH |
| 344 | 640116 | RTA22200010F.n.01.1.P.Seq | F | M00056503:711 | CH16COP |
| 345 | 730282 | RTA22200010F.k.18.1.P.Seq | F | M00056483:66 | CH16COP |
| 346 | 550571 | RTA22200019F.h.11.1.P.Seq | F | M00054502:52 | CH17COHLV |
| 347 | 1183 | RTA22200248F.c.22.1.P.Seq | F | M00027527:74 | CH04MAL |
| 348 | 449437 | RTA22200019F.g.09.1.P.Seq | F | M00054494:51 | CH17COHLV |
| 349 | 8966 | RTA22200242F.d.21.1.P.Seq | F | M00026994:17 | CH04MAL |
| 350 | 6134 | RTA22200006F.p.04.2.P.Seq | F | M00056125:49 | CH15CON |
| 351 | 95700 | RTA22200241F.f.09.1.P.Seq | F | M00026896:510 | CH04MAL |
| 352 | 7066 | RTA22200229F.a.23.1.P.Seq | F | M00006928:14 | CH02COH |
| 353 | 648310 | RTA22200007F.a.23.1.P.Seq | F | M00056143:59 | CH15CON |
| 354 | 730059 | RTA22200013F.k.11.1.P.Seq | F | M00056874:45 | CH16COP |
| 355 | 736014 | RTA22200012F.f.11.1.P.Seq | F | M00056708:411 | CH16COP |
| 356 | 646577 | RTA22200012F.d.07.1.P.Seq | F | M00056693:38 | CH16COP |
| 357 | 732254 | RTA22200014F.g.09.1.P.Seq | F | M00056967:57 | CH16COP |
| 358 | 7037 | RTA22200229F.b.01.1.P.Seq | F | M00006928:41 | CH02COH |
| 359 | 7037 | RTA22200229F.a.24.1.P.Seq | F | M00006928:41 | CH02COH |
| 360 | 6937 | RTA22200232F.b.06.1.P.Seq | F | M00021864:57 | CH03MAH |
| 361 | 7572 | RTA22200228F.k.06.2.P.Seq | F | M00006867:612 | CH02COH |
| 362 | 388085 | RTA22200005F.c.21.1.P.Seq | F | M00055868:43 | CH15CON |
| 363 | 2676 | RTA22200227F.p.19.1.P.Seq | F | M00006761:35 | CH02COH |
| 364 | 639240 | RTA22200007F.p.19.1.P.Seq | F | M00056238:57 | CH15CON |
| 365 | 650472 | RTA22200012F.e.19.1.P.Seq | F | M00056705:57 | CH16COP |
| 366 | 727789 | RTA22200012F.g.19.1.P.Seq | F | M00056715:31 | CH16COP |
| 367 | 2495 | RTA22200238F.e.03.1.P.Seq | F | M00022895:211 | CH03MAH |
| 368 | 732254 | RTA22200014F.g.09.2.P.Seq | F | M00056967:57 | CH16COP |
| 369 | 5268 | RTA22200225F.m.13.1.P.Seq | F | M00005517:64 | CH02COH |
| 370 | 11881 | RTA22200238F.e.09.1.P.Seq | F | M00022897:83 | CH03MAH |
| 371 | 448677 | RTA22200009F.b.05.2.P.Seq | F | M00042440:55 | CH16COP |
| 372 | 1876 | RTA22200235F.i.14.2.P.Seq | F | M00022496:64 | CH03MAH |
| 373 | 3441 | RTA22200233F.e.23.1.P.Seq | F | M00008065:62 | CH03MAH |
| 374 | 726134 | RTA22200011F.l.05.1.P.Seq | F | M00056618:611 | CH16COP |
| 375 | 9048 | RTA22200222F.g.12.1.P.Seq | F | M00003804:19 | CH01COH |
| 376 | 26489 | RTA22200242F.k.07.1.P.Seq | F | M00027039:66 | CH04MAL |
| 377 | 644205 | RTA22200007F.c.24.1.P.Seq | F | M00056162:68 | CH15CON |
| 378 | 468689 | RTA22200006F.f.04.2.P.Seq | F | M00056036:26 | CH15CON |
| 379 | 638971 | RTA22200012F.k.19.1.P.Seq | F | M00056746:12 | CH16COP |
| 380 | 10274 | RTA22200241F.l.17.1.P.Seq | F | M00026936:312 | CH04MAL |
| 381 | 6725 | RTA22200232F.f.22.1.P.Seq | F | M00022013:85 | CH03MAH |
| 382 | 2488 | RTA22200012F.l.21.1.P.Seq | F | M00056754:49 | CH16COP |
| 383 | 8366 | RTA22200244F.c.08.1.P.Seq | F | M00027173:48 | CH04MAL |
| 384 | 502683 | RTA22200007F.a.09.1.P.Seq | F | M00056139:71 | CH15CON |
| 385 | 450914 | RTA22200012F.k.22.1.P.Seq | F | M00056747:45 | CH16COP |
| 386 | 21205 | RTA22200243F.k.21.1.P.Seq | F | M00027140:311 | CH04MAL |
| 387 | 644205 | RTA22200007F.d.01.1.P.Seq | F | M00056162:68 | CH15CON |
| 388 | 5268 | RTA22200225F.m.05.1.P.Seq | F | M00005513:69 | CH02COH |
| 389 | 8012 | RTA22200232F.n.17.1.P.Seq | F | M00022148:16 | CH03MAH |
| 390 | 11270 | RTA22200227F.m.18.1.P.Seq | F | M00006734:18 | CH02COH |
| 391 | 10924 | RTA22200237F.h.04.1.P.Seq | F | M00022738:46 | CH03MAH |
| 392 | 11619 | RTA22200241F.g.14.1.P.Seq | F | M00026902:74 | CH04MAL |
| 393 | 3650 | RTA22200236F.e.11.1.P.Seq | F | M00022617:32 | CH03MAH |
| 394 | 1655 | RTA22200222F.e.14.1.P.Seq | F | M00001637:49 | CH01COH |
| 395 | 3275 | RTA22200238F.b.21.1.P.Seq | F | M00022876:25 | CH03MAH |
| 396 | 3355 | RTA22200238F.c.05.1.P.Seq | F | M00022880:79 | CH03MAH |
| 397 | 2078 | RTA22200235F.g.18.1.P.Seq | F | M00022473:26 | CH03MAH |
| 398 | 4809 | RTA22200222F.g.09.1.P.Seq | F | M00003794:47 | CH01COH |
| 399 | 6402 | RTA22200236F.l.15.1.P.Seq | F | M00022660:24 | CH03MAL |
| 400 | 555244 | RTA22200023F.e.03.1.P.Seq | F | M00055042:21 | CH17COHLV |
| 401 | 548965 | RTA22200012F.g.16.1.P.Seq | F | M00056715:410 | CH16COP |
| 402 | 4747 | RTA22200227F.m.12.1.P.Seq | F | M00006731:38 | CH02COH |
| 403 | 40208 | RTA22200241F.n.21.1.P.Seq | F | M00026950:81 | CH04MAL |
| 404 | 14596 | RTA22200241F.d.18.1.P.Seq | F | M00026879:22 | CH04MAL |
| 405 | 7110 | RTA22200232F.n.01.1.P.Seq | F | M00022143:41 | CH03MAH |
| 406 | 7110 | RTA22200232F.m.24.1.P.Seq | F | M00022143:41 | CH03MAH |
| 407 | 6592 | RTA22200238F.p.20.1.P.Seq | F | M00023029:56 | CH03MAH |
| 408 | 6455 | RTA22200232F.o.06.1.P.Seq | F | M00022151:75 | CH03MAH |
| 409 | 2738 | RTA22200232F.g.16.1.P.Seq | F | M00022050:44 | CH03MAH |
| 410 | 696 | RTA22200232F.m.02.1.P.Seq | F | M00022132:64 | CH03MAH |
| 411 | 379186 | RTA22200012F.c.05.1.P.Seq | F | M00056682:610 | CH16COP |
| 412 | 1588 | RTA22200232F.o.03.1.P.Seq | F | M00022151:411 | CH03MAH |
| 413 | 7007 | RTA22200225F.e.05.1.P.Seq | F | M00005454:33 | CH02COH |
| 414 | 9025 | RTA22200222F.k.23.1.P.Seq | F | M00004080:15 | CH01COH |
| 415 | 650749 | RTA22200007F.i.16.2.P.Seq | F | M00056220:49 | CH15CON |
| 416 | 553158 | RTA22200005F.e.13.1.P.Seq | F | M00055879:511 | CH15CON |
| 417 | 641703 | RTA22200003F.e.18.1.P.Seq | F | M00055628:18 | CH15CON |
| 418 | 833 | RTA22200006F.j.24.2.P.Seq | F | M00056077:512 | CH15CON |
| 419 | 649259 | RTA22200006F.o.01.2.P.Seq | F | M00056108:212 | CH15CON |
| 420 | 451179 | RTA22200011F.i.14.1.P.Seq | F | M00056596:88 | CH16COP |
| 421 | 9505 | RTA22200231F.B.20.1.P.Seq | F | M00007935:15 | CH03MAH |
| 422 | 736728 | RTA22200015F.n.19.1.P.Seq | F | M00057134:31 | CH16COP |
| 423 | 380412 | RTA22200001F.p.23.1.P.Seq | F | M00054918:43 | CH15CON |
| 424 | 642425 | RTA22200011F.k.12.1.P.Seq | F | M00056613:15 | CH16COP |
| 425 | 405073 | RTA22200007F.o.05.1.P.Seq | F | M00056273:11 | CH15CON |
| 426 | 174250 | RTA22200008F.h.09.1.P.Seq | F | M00056475:61 | CH15CON |
| 427 | 72628 | RTA22200017F.d.08.1.P.Seq | F | M00057324:412 | CH16COP |
| 428 | 639029 | RTA22200007F.k.05.2.P.Seq | F | M00056233:63 | CH15CON |
| 429 | 452245 | RTA22200022F.l.05.1.P.Seq | F | M00054963:811 | CH17COHLV |
| 430 | 510254 | RTA22200005F.p.22.1.P.Seq | F | M00056204:14 | CH15CON |
| 431 | 642425 | RTA22200007F.g.19.1.P.Seq | F | M00055912:510 | CH15CON |
| 432 | 51939 | RTA22200005F.i.22.1.P.Seq | F | M00055912:510 | CH15CON |
| 433 | 7379 | RTA22200228F.f.21.1.P.Seq | F | M00006821:21 | CH02COH |
| 434 | 546632 | RTA22200013F.h.16.1.P.Seq | F | M00056858:112 | CH16COP |
| 435 | 734827 | RTA22200011F.m.09.1.P.Seq | F | M00056631:38 | CH16COP |
| 436 | 2554 | RTA22200231F.g.06.1.P.Seq | F | M00007961:65 | CH03MAH |
| 437 | 643285 | RTA22200012F.a.16.1.P.Seq | F | M00056665:111 | CH16COP |
| 438 | 448770 | RTA22200001F.o.07.1.P.Seq | F | M00054793:27 | CH15CON |
| 439 | 375380 | RTA22200023F.e.20.1.P.Seq | F | M00055046:37 | CH17COHLV |
| 440 | 726134 | RTA22200011F.l.10.1.P.Seq | F | M00056620:512 | CH16C0P |
| 441 | 422687 | RTA22200015F.p.03.1.P.Seq | F | M00057143:55 | CH16COP |
| 442 | 448436 | RTA22200012F.n.02.1.P.Seq | F | M00056763:45 | CH16COP |
| 443 | 644893 | RTA22200012F.l.24.1.P.Seq | F | M00056754:15 | CH16COP |
| 444 | 559104 | RTA22200012F.n.21.1.P.Seq | F | M00056771:312 | CH16COP |
| 445 | 551172 | RTA22200016F.g.09.1.P.Seq | F | M00057211:16 | CH16COP |
| 446 | 724296 | RTA22200012F.f.22.1.P.Seq | F | M00056710:67 | CH16COP |
| 447 | 735936 | RTA22200009F.p.13.1.P.Seq | F | M00056346:312 | CH16COP |
| 448 | 556326 | RTA22200023F.k.20.1.P.Seq | F | M00055085:110 | CH17COHLV |
| 449 | 729699 | RTA22200011F.o.04.1.P.Seq | F | M00056646:32 | CH16COP |
| 450 | 550694 | RTA22200022F.a.05.1.P.Seq | F | M00054867:27 | CH17COHLV |
| 451 | 734738 | RTA22200017F.e.11.1.P.Seq | F | M00057337:72 | CH16COP |
| 452 | 404502 | RTA22200007F.p.08.1.P.Seq | F | M00056286:58 | CH15CON |
| 453 | 554151 | RTA22200015F.o.18.1.P.Seq | F | M00057142:17 | CH16COP |
| 454 | 649852 | RTA22200001F.n.24.1.P.Seq | F | M00042914:210 | CH15CON |
| 455 | 734063 | RTA22200011F.m.16.1.P.Seq | F | M0005663:27 | CH16COP |
| 456 | 7279 | RTA22200230F.b.22.1.P.Seq | F | M00007108:41 | CH02COH |
| 457 | 2676 | RTA22200230F.l.05.1.P.Seq | F | M00007204:41 | CH02COH |
| 458 | 649148 | RTA22200006F.k.08.2.P.Seq | F | M00056079:311 | CH15CON |
| 459 | 1953 | RTA22200226F.p.21.1.P.Seq | F | M00006576:24 | CH02COH |
| 460 | 650108 | RTA22200006F.d.04.2.P.Seq | F | M00056018:75 | CH15CON |
| 461 | 515350 | RTA22200005F.g.04.1.P.Seq | F | M00055886:79 | CH15CON |
| 462 | 402494 | RTA22200013F.a.15.1.P.Seq | F | M00056796:85 | CH16COP |
| 463 | 649148 | RTA22200013F.d.09.1.P.Seq | F | M00056821:39 | CH16COP |
| 464 | 833 | RTA22200006F.k.01.2.P.Seq | F | M00056077:512 | CH15CON |
| 465 | 139730 | RTA22200242F.g.02.1.P.Seq | F | M00027014:74 | CH04MAL |
| 466 | 453079 | RTA22200009F.k.11.2.P.Seq | F | M00042835:42 | CH16COP |
| 467 | 546705 | RTA22200003F.p.11.1.P.Seq | F | M00055729:16 | CH15CON |
| 468 | 644903 | RTA22200003F.f.09.1.P.Seq | F | M00055635:74 | CH15CON |
| 469 | 732254 | RTA22200013F.g.01.1.P.Seq | F | M00056842:612 | CH16COP |
| 470 | 561180 | RTA22200003F.e.19.1.P.Seq | F | M00055630:59 | CH15CON |
| 471 | 732254 | RTA22200013F.f.24.1.P.Seq | F | M00056842:612 | CH16COP |
| 472 | 449204 | RTA22200009F.k.07.2.P.Seq | F | M00042834:26 | CH16COP |
| 473 | 185651 | RTA22200242F.f.20.1.P.Seq | F | M00027013:510 | CH04MAL |
| 474 | 639029 | RTA22200013F.l.04.1.P.Seq | F | M00056880:24 | CH16COP |
| 475 | 452986 | RTA22200007F.f.11.1.P.Seq | F | M00056192:54 | CH15CON |
| 476 | 729779 | RTA22200011F.i.05.1.P.Seq | F | M00056594:36 | CH16COP |
| 477 | 646248 | RTA22200005F.o.19.1.P.Seq | F | M00055979:29 | CH15CON |
| 478 | 650448 | RTA22200012F.a.11.1.P.Seq | F | M00056664:27 | CH16COP |
| 479 | 642049 | RTA22200003F.o.23.1.P.Seq | F | M00055726:28 | CH15CON |
| 480 | 728273 | RTA22200012F.f.20.1.P.Seq | F | M00056710:65 | CH16COP |
| 481 | 446139 | RTA22200007F.l.09.2.P.Seq | F | M00056244:37 | CH15CON |
| 482 | 2783 | RTA22200008F.f.20.1.P.Seq | F | M00056456:62 | CH15CON |
| 483 | 642906 | RTA22200012F.n.20.1.P.Seq | F | M00056771:612 | CH16COP |
| 484 | 8332 | RTA22200236F.j.08.1.P.Seq | F | M00022651:24 | CH03MAH |
| 485 | 453470 | RTA22200007F.j.08.2.P.Seq | F | M00056224:58 | CH15CON |
| 486 | 552277 | RTA22200020F.p.05.1.P.Seq | F | M00054706:39 | CH17COHLV |
| 487 | 484029 | RTA22200001F.m.09.1.P.Seq | F | M00042901:13 | CH15CON |
| 488 | 547916 | RTA22200008F.f.11.1.P.Seq | F | M00056448:39 | CH15CON |
| 489 | 649722 | RTA22200006F.m.10.2.P.Seq | F | M00056094:87 | CH15CON |
| 490 | 612572 | RTA22200007F.l.08.2.P.Seq | F | M00056244:28 | CH15CON |
| 491 | 385980 | RTA22200012F.p.05.1.P.Seq | F | M00056784:25 | CH16COP |
| 492 | 141185 | RTA22200007F.i.02.2.P.Seq | F | M00056215:53 | CH15CON |
| 493 | 463824 | RTA22200006F.p.16.2.P.Seq | F | M00056133:49 | CH15CON |
| 494 | 446139 | RTA22200007F.g.14.1.P.Seq | F | M00056201:88 | CH15CON |
| 495 | 725994 | RTA22200011F.h.16.1.P.Seq | F | M00056591.53 | CH16COP |
| 496 | 736679 | RTA22200011F.o.02.1.P.Seq | F | M00056645:66 | CH16COP |
| 497 | 551718 | RTA22200013F.a.18.1.P.Seq | F | M00056799:511 | CH16COP |
| 498 | 640525 | RTA22200003F.m.23.1.P.Seq | F | M00055707:38 | CH15CON |
| 499 | 645210 | RTA22200007F.m.03.1.P.Seq | F | M00056251:16 | CH15CON |
| 500 | 6567 | RTA22200235F.p.09.2.P.Seq | F | M00022569:17 | CH03MAH |
| 501 | 646146 | RTA22200005F.p.10.1.P.Seq | F | M00055985:41 | CH15CON |
| 502 | 4934 | RTA22200227F.a.18.1.P.Seq | F | M00006587:18 | CH02COH |
| 503 | 450791 | RTA22200011F.l.04.1.P.Seq | F | M00056618:66 | CH16COP |
| 504 | 227936 | RTA22200009F.p.09.1.P.Seq | F | M00042879:69 | CH16COP |
| 505 | 9436 | RTA22200020F.m.12.1.P.Seq | F | M00054679:412 | CH17COHLV |
| 506 | 2557 | RTA22200226F.b.14.1.P.Seq | F | M00005610:211 | CH02COH |
| 507 | 11356 | RTA22200228F.g.20.1.P.Seq | F | M00006831:85 | CH02COH |
| 508 | 7571 | RTA22200226F.l.17.1.P.Seq | F | M00005769:13 | CH02COH |
| 509 | 558116 | RTA22200007F.g.09.1.P.Seq | F | M00056199:19 | CH15CON |
| 510 | 216574 | RTA22200007F.o.12.1.P.Seq | F | M00056775:17 | CH16COP |
| 511 | 455145 | RTA22200005F.l.12.1.P.Seq | F | M00055936:57 | CH15CON |
| 512 | 649148 | RTA22200007F.k.01.2.P.Seq | F | M00056231:79 | CH15CON |
| 513 | 648996 | RTA22200007F.m.08.1.P.Seq | F | M00056253:612 | CH15CON |
| 514 | 304253 | RTA22200013F.g.11.1.P.Seq | F | M00056844:110 | CH16COP |
| 515 | 649717 | RTA22200008F.g.10.1.P.Seq | F | M00056466:13 | CH15CON |
| 516 | 5838 | RTA22200226F.h.10.1.P.Seq | F | M00005685:412 | CH02COH |
| 517 | 454050 | RTA22200005F.m.23.1.P.Seq | F | M00055956:52 | CH15CON |
| 518 | 557903 | RTA22200011F.j.17.1.P.Seq | F | M00056608:54 | CH16COP |
| 519 | 1724 | RTA22200240F.k.16.1.P.Seq | F | M00023518:14 | CH04MAL |
| 520 | 734803 | RTA22200011F.n.23.1.P.Seq | F | M00056645:211 | CH16COP |
| 521 | 557948 | RTA22200023F.b.07.1.P.Seq | F | M00055022:84 | CH17COHLV |
| 522 | 5838 | RTA22200229F.i.24.1.P.Seq | F | M00006997:13 | CH02COH |
| 523 | 2334 | RTA22200017F.c.04.1.P.Seq | F | M000573112:511 | CH02COH |
| 524 | 450953 | RTA22200022F.h.12.1.P.Seq | F | M00054937:210 | CH17COHLV |
| 525 | 4840 | RTA22200236F.i.16.1.P.Seq | F | M00022645:15 | CH03MAH |
| 526 | 728421 | RTA22200011F.m.20.1.P.Seq | F | M00056635:111 | CH16COP |
| 527 | 4747 | RTA22200228F.f.23.1.P.Seq | F | M00006822:19 | CH02COH |
| 528 | 648934 | RTA22200005F.m.08.1.P.Seq | F | M00055945:510 | CH15CON |
| 529 | 1787 | RTA22200226F.d.09.1.P.Seq | F | M00005627:210 | CH02COH |
| 530 | 558098 | RTA22200006F.j.17.2.P.Seq | F | M00056074:710 | CH15CON |
| 531 | 1655 | RTA22200222F.k.16.1.P.Seq | F | M00004066:42 | CH01COH |
| 532 | 158601 | RTA22200242F.h.06.1.P.Seq | F | M00027021.811 | CH04MAL |
| 533 | 185486 | RTA22200240F.g.17.1.P.Seq | F | M00023393:512 | CH04MAL |
| 534 | 7110 | RTA22200232F.k.19.1.P.Seq | F | M00022106:44 | CH03MAH |
| 535 | 2543 | RTA22200230F.k.02.1.P.Seq | F | M00007192:56 | CH03MAH |
| 536 | 115762 | RTA22200012F.k.02.1.P.Seq | F | M00056707:45 | CH02COH |
| 537 | 696 | RTA22200243F.p.04.1.P.Seq | F | M00027163:411 | CH04MAL |
| 538 | 1948 | RTA22200232F.l.23.1.P.Seq | F | M00022132:410 | CH03MAH |
| 539 | 696 | RTA22200241F.o.01.1.P.Seq | F | M00026951:711 | CH04MAL |
| 540 | 696 | RTA22200241F.n.24.1.P.Seq | F | M00026951:711 | CH04MAL |
| 541 | 380477 | RTA22200004F.h.14.1.P.Seq | F | M00055791:63 | CH15CON |
| 542 | 638799 | RTA22200002F.b.05.1.P.Seq | F | M00055428:12 | CH15CON |
| 543 | 551982 | RTA22200019F.m.15.1.P.Seq | F | M00054542:18 | CH17COHLV |
| 544 | 551982 | RTA22200021F.k.10.3.P.Seq | F | M00054815:51 | CH17COHLV |
| 545 | 521840 | RTA22200021F.c.20.2.P.Seq | F | M00054739:56 | CH17COHLV |
| 546 | 561180 | RTA22200026F.d.16.1.P.Seq | F | M00055423:110 | CH17COHLV |
| 547 | 556245 | RTA22200020F.i.02.1.P.Seq | F | M00054636:12 | CH17COHLV |
| 548 | 449792 | RTA22200001F.a.07.1.P.Seq | F | M00042345:612 | CH15CON |
| 549 | 549722 | RTA22200020F.d.22.1.P.Seq | F | M00054595:22 | CH17COHLV |
| 550 | 612572 | RTA22200024F.i.24.1.P.Seq | F | M00055216:13 | CH17COHLV |
| 551 | 551235 | RTA22200021F.l.12.3.P.Seq | F | M00054826:25 | CH17COHLV |
| 552 | 449701 | RTA22200009F.h.04.1.P.Seq | F | M00042802:711 | CH16COP |
| 553 | 375380 | RTA22200026F.e.18.1.P.Seq | F | M00055472:83 | CH17COHLV |
| 554 | 56940 | RTA22200021F.l.14.3.P.Seq | F | M00054826:55 | CH17COHLV |
| 555 | 549160 | RTA22200021F.c.19.2.P.Seq | F | M00054739:43 | CH17COHLV |
| 556 | 554151 | RTA22200021F.l.13.3.P.Seq | F | M00054826:310 | CH17COHLV |
| 557 | 727331 | RTS22200015F.b.19.1.P.Seq | F | M00057052:211 | CH16COP |
| 558 | 551502 | RTA22200019F.o.20.1.P.Seq | F | M00054555:712 | CH17COHLV |
| 559 | 612572 | RTA22200024F.j.01.1.P.Seq | F | M00055216:13 | CH17COHLV |
| 560 | 701221 | RTA22200002F.o.23.1.P.Seq | F | M00055556:89 | CH15CON |
| 561 | 378041 | RTA22200004F.b.17.1.P.Seq | F | M00057167:712 | CH15CON |
| 562 | 503491 | RTA22200016F.l.16.1.P.Seq | F | M00055812:51 | CH16COP |
| 563 | 452833 | RTA22200018F.e.01.1.P.Seq | F | M00042520:69 | CH17COHLV |
| 564 | 640974 | RTA22200002F.i.20.1.P.Seq | F | M00055512:68 | CH15CON |
| 565 | 735326 | RTA22200013F.n.08.1.P.Seq | F | M00056898:44 | CH16COP |
| 566 | 555944 | RTA22200021F.i.03.3.P.Seq | F | M00054780:78 | CH17COHLV |
| 567 | 447532 | RTA22200001F.d.07.1.P.Seq | F | M00042556:44 | CH15CON |
| 568 | 455598 | RTA22200002F.k.15.1.P.Seq | F | M00055526:69 | CH15CON |
| 569 | 555734 | RTA22200022F.b.08.1.P.Seq | F | M00054875:34 | CH17COHLV |
| 570 | 446663 | RTA22200001F.a.11.1.P.Seq | F | M00042523:58 | CH15CON |
| 571 | 449862 | RTA22200024F.i.07.1.P.Seq | F | M00055207:14 | CH17COHLV |
| 572 | 549591 | RTA22200023F.o.03.1.P.Seq | F | M00055117:33 | CH17COHLV |
| 573 | 553877 | RTA22200021F.c.23.2.P.Seq | F | M00054740:88 | CH17COHLV |
| 574 | 553501 | RTA22200021F.a.01.2.P.Seq | F | M000504720:412 | CH17COHLV |
| 575 | 1905 | RTA22200020F.p.14.1.P.Seq | F | M00054713:412 | CH17COHLV |
| 576 | 446599 | RTA22200001F.h.20.1.P.Seq | F | M00042720:46 | CH15CON |
| 577 | 559409 | RTA22200024F.d.17.1.P.Seq | F | M00055170:61 | CH17COHLV |
| 578 | 551982 | RTA22200026F.g.14.1.P.Seq | F | M00055485:39 | CH17COHLV |
| 579 | 559057 | RTA22200024F.d.23.1.P.Seq | F | M00055172:44 | CH17COHLV |
| 580 | 446760 | RTA22200001F.b.09.1.P.Seq | F | M00042536:61 | CH15CON |
| 581 | 551502 | RTA22200020F.o.06.1.P.Seq | F | M00054694:74 | CH17COHLV |
| 582 | 446531 | RTA22200025F.o.04.2.P.Seq | F | M00055395:32 | CH17COHLV |
| 583 | 506744 | RTA22200021F.h.07.3.P.Seq | F | M00054772.36 | CH17COHLV |
| 584 | 401849 | RTA22200002F.n.02.1.P.Seq | F | M00055544:22 | CH15CON |
| 585 | 453848 | RTA22200009F.n.04.1.P.Seq | F | M00042853:14 | CH16COP |
| 586 | 456764 | RTA22200004F.c.15.1.P.Seq | F | M00055755:42 | CH15CON |
| 587 | 446371 | RTA22200003F.c.17.1.P.Seq | F | M00055594:11 | CH15CON |
| 588 | 406413 | RTA22200021F.c.09.2.P.Seq | F | M00054734:810 | CH17COHLV |
| 589 | 555103 | RTA22200024F.a.21.1.P.Seq | F | M00055148:411 | CH17COHLV |
| 590 | 735292 | RTA22200015F.c.13.1.P.Seq | F | M00057059:89 | CH16COP |
| 591 | 558534 | RTA22200023F.o.13.1.P.Seq | F | M00055125:61 | CH17COHLV |
| 592 | 727181 | RTA22200016F.k.12.1.P.Seq | F | M00057242:29 | CH16COP |
| 593 | 551117 | RTA22200021F.f.14.3.P.Seq | F | M00054760:112 | CH17COHLV |
| 594 | 464040 | RTA22200024F.g.21.1.P.Seq | F | M00055198:77 | CH17COHLV |
| 595 | 446371 | RTA22200001F.h.03.1.P.Seq | F | M00042712:210 | CH15CON |
| 596 | 728408 | RTA22200014F.p.13.3.P.Seq | F | M00057033:69 | CH16COP |
| 597 | 649259 | RTA22200006F.n.24.2.P.Seq | F | M00056108:212 | CH15CON |
| 598 | 15414 | RTA22200023F.n.18.1.P.Seq | F | M00055113:111 | CH17COHLV |
| 599 | 639240 | RTA22200007F.k.18.2.P.Seq | F | M00056238:57 | CH15CON |
| 600 | 549722 | RTA22200020F.a.09.1.P.Seq | F | M00054568:711 | CH17COHLV |
| 601 | 561499 | RTA22200021F.b.16.2.P.Seq | F | M00054728:210 | CH17COHLV |
| 602 | 639029 | RTA22200002F.k.07.1.P.Seq | F | M00055523:33 | CH15CON |
| 603 | 449512 | RTA22200009F.p.02.1.P.Seq | F | M00042875:54 | CH16COP |
| 604 | 446987 | RTA22200001F.b.20.1.P.Seq | F | M00042540:86 | CH15CON |
| 605 | 466302 | RTA22200004F.m.18.1.P.Seq | F | M00055820:55 | CH15CON |
| 606 | 553802 | RTA22200022F.f.04.1.P.Seq | F | M00054908:67 | CH17COHLV |
| 607 | 639662 | RTA22200004F.h.15.1.P.Seq | F | M0005572:79 | CH15CON |
| 608 | 551527 | RTA22200014F.k.03.2.P.Seq | F | M00056998:58 | CH16COP |
| 609 | 730389 | RTA22200016F.b.02.1.P.Seq | F | M00057162:410 | CH16COP |
| 610 | 640974 | RTA22200002F.n.03.1.P.Seq | F | M00055543:78 | CH15CON |
| 611 | 417155 | RTA22200002F.o.01.1.P.Seq | F | M00055548:512 | CH15CON |
| 612 | 417155 | RTA22200002F.n.24.1.P.Seq | F | M00055548:512 | CH15CON |
| 613 | 451784 | RTA22200008F.d.18.1.P.Seq | F | M00056330:43 | CH15CON |
| 614 | 649152 | RTA22200002F.f.04.1.P.Seq | F | M00055464:65 | CH15CON |
| 615 | 450867 | RTA22200003F.d.19.1.P.Seq | F | M00055613:410 | CH15CON |
| 616 | 143436 | RTA22200003F.d.04.1.P.Seq | F | M00055602:57 | CH15CON |
| 617 | 549395 | RTA22200004F.o.05.1.P.Seq | F | M00055827:55 | CH15CON |
| 618 | 639273 | RTA22200002F.h.02.1.P.Seq | F | M00055496:57 | CH15CON |
| 619 | 506744 | RTA22200021F.m.02.2.P.Seq | F | M00054841:27 | CH17COHLV |
| 620 | 736595 | RTA22200014F.i.22.2.P.Seq | F | M00056990:29 | CH16COP |
| 621 | 230995 | RTA22200016F.i.10.1.P.Seq | F | M00057226:35 | CH16COP |
| 622 | 451784 | RTA22200019F.p.21.1.P.Seq | F | M00054563:39 | CH17COHLV |
| 623 | 226324 | RTA22200020F.n.04.1.P.Seq | F | M00054681:22 | CH17COHLV |
| 624 | 449617 | RTA22200009F.m.12.1.P.Seq | F | M00042849:611 | CH16COP |
| 625 | 451092 | RTA22200026F.h.02.1.P.Seq | F | M00055487:66 | CH17COHLV |
| 626 | 546642 | RTA22200016F.o.16.1.P.Seq | F | M00057275:112 | CH16COP |
| 627 | 553736 | RTA22200022F.j.18.1.P.Seq | F | M00054952:61 | CH17COHLV |
| 628 | 394413 | RTA22200002F.e.15.1.P.Seq | F | M00055456:612 | CH15CON |
| 629 | 556326 | RTA22200021F.j.24.3.P.Seq | F | M00054812:37 | CH17COHLV |
| 630 | 448606 | RTA22200021F.d.08.2.P.Seq | F | M00054741:710 | CH17COHLV |
| 631 | 394413 | RTA22200002F.k.19.1.P.Seq | F | M00055527:52 | CH15CON |
| 632 | 645633 | RTA22200002F.j.09.1.P.Seq | F | M00055516:58 | CH15CON |
| 633 | 551634 | RTA22200021F.j.07.3.P.Seq | F | M00054808:68 | CH17COHLV |
| 634 | 556326 | RTA22200021F.k.01.3.P.Seq | F | M00054812:37 | CH17COHLV |
| 635 | 540787 | RTA22200004F.n.21.1.P.Seq | F | M00055827:42 | CH15CON |
| 636 | 648872 | RTA22200004F.f.05.1.P.Seq | F | M0005575:36 | CH15CON |
| 637 | 643804 | RTA22200004F.f.05.1.P.Seq | F | M00055775:36 | CH15CON |
| 638 | 446139 | RTA22200001F.e.06.1.P.Seq | F | M00042565:18 | CH15CON |
| 639 | 640356 | RTA22200002F.p.15.1.P.Seq | F | M00055563:12 | CH15CON |
| 640 | 379186 | RTA22200015F.i.09.1.P.Seq | F | M00057099:38 | CH16COP |
| 641 | 454927 | RTA22200021F.b.13.2.P.Seq | F | M00054728:58 | CH17COHLV |
| 642 | 401849 | RTA22200004F.h.06.1.P.Seq | F | M00055790:82 | CH15CON |
| 643 | 452414 | RTA22200004F.i.20.1.P.Seq | F | M00055798:36 | CH15CON |
| 644 | 446789 | RTA22200004F.k.24.1.P.Seq | F | M00055807:710 | CH15CON |
| 645 | 189561 | RTA22200022F.n.17.1.P.Seq | F | M00054985:67 | CH17COHLV |
| 646 | 640323 | RTA22200003F.g.22.1.P.Seq | F | M00055653:84 | CH15CON |
| 647 | 558116 | RTA22200024F.h.08.1.P.Seq | F | M00055201:27 | CH17COHLV |
| 648 | 468109 | RTA22200004F.m.20.1.P.Seq | F | M00055820:38 | CH15CON |
| 649 | 481441 | RTA22200003F.b.12.1.P.Seq | F | M00055583:85 | CH15CON |
| 650 | 449956 | RTA22200018F.n.17.1.P.Seq | F | M00043365:36 | CH17COHLV |
| 651 | 727224 | RTA22200013F.p.12.1.P.Seq | F | M00056913:710 | CH16COP |
| 652 | 551907 | RTA22200020F.l.04.1.P.Seq | F | M00054665:88 | CH17COHLV |
| 653 | 447532 | RTA22200004F.a.12.1.P.Seq | F | M00055736:73 | CH15CON |
| 654 | 447532 | RTA22200003F.b.14.1.P.Seq | F | M00055584:311 | CH15CON |
| 655 | 558454 | RTA22200026F.c.17.1.P.Seq | F | M00055417:78 | CH17COHLV |
| 656 | 502683 | RTA22200020F.j.12.1.P.Seq | F | M00054647:82 | CH17COHLV |
| 657 | 446909 | RTA22200023F.n.17.1.P.Seq | F | M00055112:33 | CH17COHLV |
| 658 | 452506 | RTA22200020F.c.23.1.P.Seq | F | M00054587:69 | CH17COHLV |
| 659 | 449792 | RTA22200023F.c.02.1.P.Seq | F | M00055027:68 | CH17COHLV |
| 660 | 549395 | RTA22200020F.i.08.1.P.Seq | F | M00054638:49 | CH17COHLV |
| 661 | 234653 | RTA22200020F.g.14.1.P.Seq | F | M00054621:36 | CH17COHLV |
| 662 | 453911 | RTA22200015F.f.01.1.P.Seq | F | M00057074:39 | CH16COP |
| 663 | 452071 | RTA22200001F.a.18.1.P.Seq | F | M00042529:77 | CH15CON |
| 664 | 451032 | RTA22200018F.g.04.1.P.Seq | F | M00043310:23 | CH17COHLV |
| 665 | 446680 | RTA22200018F.g.17.1.P.Seq | F | M00043313:36 | CH17COHLV |
| 666 | 641884 | RTA22200008F.b.08.1.P.Seq | F | M00056303:24 | CH15CON |
| 667 | 452800 | RTA22200018F.e.16.1.P.Seq | F | M00043301:66 | CH17COHLV |
| 668 | 461835 | RTA22200004F.f.08.1.P.Seq | F | M00055778:69 | CH15CON |
| 669 | 548965 | RTA22200020F.g.08.1.P.Seq | F | M00054617:19 | CH17COHLV |
| 670 | 734793 | RTA22200016F.c.20.1.P.Seq | F | M00057174:812 | CH16COP |
| 671 | 539955 | RTA22200008F.a.12.1.P.Seq | F | M00056295:46 | CH15CON |
| 672 | 561892 | RTA22200020F.f.11.1.P.Seq | F | M00054609:61 | CH17COHLV |
| 673 | 562292 | RTA22200020F.e.06.1.P.Seq | F | M00054596:711 | CH17COHLV |
| 674 | 420686 | RTA22200001F.j.02.1.P.Seq | F | M00042735:72 | CH15CON |
| 675 | 9436 | RTA22200004F.f.20.1.P.Seq | F | M00055781:35 | CH15CON |
| 676 | 1013 | RTA22200004F.e.21.1.P.Seq | F | M00055774:51 | CH15CON |
| 677 | 412364 | RTA22200008F.b.07.1.P.Seq | F | M00056303:33 | CH15CON |
| 678 | 44424 | RTA22200018F.j.01.1.P.Seq | F | M00043327:82 | CH17COHLV |
| 679 | 394413 | RTA22200001F.j.18.1.P.Seq | F | M00042742:45 | CH15CON |
| 680 | 449617 | RTA22200008F.c.08.1.P.Seq | F | M00056312:14 | CH15CON |
| 681 | 455032 | RTA22200018F.l.07.1.P.Seq | F | M00043347:712 | CH17COHLV |
| 682 | 185400 | RTA22200025F.b.17.1.P.Seq | F | M00055279:512 | CH17COHLV |
| 683 | 453911 | RTA22200015F.e.24.1.P.Seq | F | M00057074:39 | CH16COP |
| 684 | 650297 | RTA22200004F.e.23.1.P.Seq | F | M00055774:73 | CH15COP |
| 685 | 185400 | RTA22200018F.k.02.1.P.Seq | F | M00043338:23 | CH17COHLV |
| 686 | 449512 | RTA22200025F.c.06.1.P.Seq | F | M00055283:82 | CH17COHLV |
| 687 | 44424 | RTA22200018F.i.24.1.P.Seq | F | M00043327:82 | CH17COHLV |
| 688 | 556216 | RTA22200025F.h.09.1.P.Seq | F | M00055350:61 | CH17COHLV |
| 689 | 448677 | RTA22200025F.f.07.1.P.Seq | F | M00055324:810 | CH17COHLV |
| 690 | 375380 | RTA22200025F.e.16.1.P.Seq | F | M00055319:11 | CH17COHLV |
| 691 | 379341 | RTA22200018F.a.24.1.P.Seq | F | M00042442:12 | CH17COHLV |
| 692 | 376988 | RTA22200025F.h.03.1.P.Seq | F | M00055346:42 | CH17COHLV |
| 693 | 559806 | RTA22200025F.g.20.1.P.Seq | F | M00055344:89 | CH17COHLV |
| 694 | 550195 | RTA22200025F.j.07.1.P.Seq | F | M00055368:310 | CH17COHLV |
| 695 | 562221 | RTA22200025F.k.09.1.P.Seq | F | M00055374:18 | CH17COHLV |
| 696 | 211 | RTA22200248F.o.19.1.P.Seq | F | M00027607:85 | CH04MAL |
| 697 | 6751 | RTA22200248F.o.01.1.P.Seq | F | M00027604:710 | CH04MAL |
| 698 | 6751 | RTA22200248F.n.24.1.P.Seq | F | M00027604:710 | CH04MAL |
| 699 | 11619 | RTA22200250F.d.17.1.P.Seq | F | M00027806:85 | CH04MAL |
| 700 | 2883 | RTA22200249F.l.14.1.P.Seq | F | M00027717:75 | CH04MAL |
| 701 | 9784 | RTA22200249F.c.12.1.P.Seq | F | M00027628:11 | CH04MAL |
| 702 | 649722 | RTA22200010F.i.15.1.P.Seq | F | M00056424:612 | CH16COP |
| 703 | 2888 | RTA22200224F.e.01.1.P.Seq | F | M00004869:46 | CH02COH |
| 704 | 10340 | RTA22200233F.p.01.1.P.Seq | F | M00021681:32 | CH03MAH |
| 705 | 1649 | RTA22200234F.g.21.1.P.Seq | F | M00022246:88 | CH03MAH |
| 706 | 4325 | RTA22200234F.i.13.1.P.Seq | F | M00022259:27 | CH03MAH |
| 707 | 10882 | RTA22200249F.f.21.1.P.Seq | F | M00027658:73 | CH04MAL |
| 708 | 10342 | RTA22200233F.l.20.1.P.Seq | F | M00021628:47 | CH03MAH |
| 709 | 6474 | RTA22200224F.e.16.1.P.Seq | F | M00004972:51 | CH02COH |
| 710 | 10340 | RTA22200233F.o.24.1.P.Seq | F | M00021681:32 | CH03MAH |
| 711 | 734723 | RTA22200010F.k.06.1.P.Seq | F | M00056480:312 | CH16COP |
| 712 | 452142 | RTA22200010F.i.16.1.P.Seq | F | M00056424:86 | CH16COP |
| 713 | 185432 | RTA22200249F.o.24.1.P.Seq | F | M00027742:21 | CH04MAL |
| 714 | 11456 | RTA22200224F.m.02.1.P.Seq | F | M00005385:110 | CH02COH |
| 715 | 508892 | RTA22200010F.p.07.1.P.Seq | F | M0056517:73 | CH16COP |
| 716 | 67 | RTA22200224F.f.14.1.P.Seq | F | M00005019:42 | CH02COH |
| 717 | 2636 | RTA22200224F.m.17.1.P.Seq | F | M00005389:31 | CH02COH |
| 718 | 735028 | RTA22200011F.e.08.1.P.Seq | F | M00056556:71 | CH16COP |
| 719 | 1924 | RTA22200224F.n.16.1.P.Seq | F | M00005395:49 | CH02COH |
| 720 | 640116 | RTA22200010F.m.24.1.P.Seq | F | M00056503:711 | CH16COP |
| 721 | 6546 | RTA22200225F.b.13.1.P.Seq | F | M00005420:31 | CH02COH |
| 722 | 730866 | RTA22200010F.p.03.1.P.Seq | F | M00056515:35 | CH16COP |
| 723 | 4829 | RTA22200224F.c.02.1.P.Seq | F | M00004850:75 | CH02COH |
| 724 | 546632 | RTA22200010F.o.12.1.P.Seq | F | M00056512:36 | CH16COP |
| 725 | 549934 | RTA22200019F.i.19.1.P.Seq | F | M00054510:89 | CH17COHLV |
| 726 | 649655 | RTA22200010F.o.22.1.P.Seq | F | M00056514:58 | CH16COP |
| 727 | 62016 | RTA22200019F.k.05.1.P.Seq | F | M00054520:25 | CH17COHLV |
| 728 | 2783 | RTA22200019F.k.18.1.P.Seq | F | M00054524:22 | CH17COHLV |
| 729 | 3876 | RTA22200019F.e.03.1.P.Seq | F | M00043504:76 | CH17COHLV |
| 730 | 20036 | RTA22200019F.f.11.1.P.Seq | F | M00054486:211 | CH17COHLV |
| 731 | 644032 | RTA22200013F.e.06.1.P.Seq | F | M00056824:51 | CH16COP |
| 732 | 451636 | RTA22200018F.o.24.1.P.Seq | F | M00043374:22 | CH17COHLV |
| 733 | 3428 | RTA22200237F.e.01.1.P.Seq | F | M00022716:36 | CH03MAH |
| 734 | 643954 | RTA22200012F.p.22.1.P.Seq | F | M00056789:510 | CH16COP |
| 735 | 456506 | RTA22200015F.p.23.1.P.Seq | F | M00057150:310 | CH16COP |
| 736 | 449269 | RTA22200014F.p.17.1.P.Seq | F | M00057035:39 | CH16COP |
| 737 | 732712 | RTA22200014F.p.03.1.P.Seq | F | M00057029:16 | CH16COP |
| 738 | 696 | RTA22200236F.c.13.1.P.Seq | F | M00022598:512 | CH03MAH |
| 739 | 456528 | RTA22200014F.n.13.1.P.Seq | F | M00057019:82 | CH16COP |
| 740 | 4043 | RTA22200228F.k.21.2.P.Seq | F | M00006871:61 | CH02COH |
| 741 | 3639 | RTA22200235F.g.13.1.P.Seq | F | M00022472:51 | CH03MAH |
| 742 | 1024 | RTA22200244F.p.09.1.P.Seq | F | M00027229:56 | CH04MAL |
| 743 | 1247 | RTA22200236F.i.17.1.P.Seq | F | M00022645:37 | CH03MAH |
| 744 | 4934 | RTA22200228F.i.13.2.P.Seq | F | M00006846:43 | CH02COH |
| 745 | 901 | RTA22200237F.f.07.1.P.Seq | F | M00022724:44 | CH03MAH |
| 746 | 452726 | RTA22200014F.i.04.1.P.Seq | F | M00057003:29 | CH16COP |
| 747 | 725825 | RTA22200014F.i.23.1.P.Seq | F | M00056990:311 | CH16COP |
| 748 | 456808 | RTA22200014F.a.19.1.P.Seq | F | M00056924:26 | CH16COP |
| 749 | 729295 | RTA22200014F.a.21.1.P.Seq | F | M00056925:37 | CH16COP |
| 750 | 551907 | RTA22200005F.a.18.1.P.Seq | F | M00055850:63 | CH15CON |
| 751 | 551527 | RTA22200014F.k.03.1.P.Seq | F | M00056998:58 | CH16COP |
| 752 | 7098 | RTA22200237F.n.22.1.P.Seq | F | M00022831:87 | CH03MAH |
| 753 | 4589 | RTA22200225F.k.24.1.P.Seq | F | M00005501:55 | CH02COH |
| 754 | 554812 | RTA22200014F.g.21.1.P.Seq | F | M00056969:38 | CH16COP |
| 755 | 3114 | RTA22200232F.g.01.1.P.Seq | F | M00022015:611 | CH03MAH |
| 756 | 6031 | RTA22200227F.m.13.1.P.Seq | F | M00006731:43 | CH02COH |
| 757 | 185628 | RTA22200242F.j.21.1.P.Seq | F | M00027035:89 | CH04MAL |
| 758 | 24719 | RTA22200244F.j.04.1.P.Seq | F | M00027197:67 | CH04MAL |
| 759 | 3428 | RTA22200237F.d.24.1.P.Seq | F | M00022716:36 | CH03MAH |
| 760 | 2676 | RTA22200227F.j.24.1.P.Seq | F | M00006695:88 | CH02COH |
| 761 | 649148 | RTA22200007F.j.24.1.P.Seq | F | M00056231:79 | CH15CON |
| 762 | 234605 | RTA22200009F.c.17.2.P.Seq | F | M00042515:110 | CH16COP |
| 763 | 2224 | RTA22200232F.g.14.1.P.Seq | F | M00022049:27 | CH03MAH |
| 764 | 185642 | RTA22200243F.a.07.1.P.Seq | F | M00027076:67 | CH04MAL |
| 765 | 649655 | RTA22200007F.d.16.1.P.Seq | F | M00056171:811 | CH15CON |
| 766 | 2854 | RTA22200231F.o.23.1.P.Seq | F | M00007998:67 | CH03MAH |
| 767 | 453470 | RTA22200007F.j.08.1.P.Seq | F | M00056224:58 | CH15CON |
| 768 | 11012 | RTA22200227F.k.14.1.P.Seq | F | M00006704:76 | CH02COH |
| 769 | 535208 | RTA22200005F.c.23.1.P.Seq | F | M00055869:16 | CH15CON |
| 770 | 448606 | RTA22200014F.j.14.1.P.Seq | F | M00056994:33 | CH16COP |
| 771 | 12304 | RTA22200244F.b.17.1.P.Seq | F | M00027172:33 | CH04MAL |
| 772 | 2756 | RTA22200229F.h.17.1.P.Seq | F | M00006989:54 | CH02COH |
| 773 | 367 | RTA22200005F.d.04.1.P.Seq | F | M00055871:65 | CH15CON |
| 774 | 11351 | RTA22200229F.c.09.1.P.Seq | F | M00006937:63 | CH02COH |
| 775 | 6858 | RTA22200228F.n.03.2.P Seq | F | M00006888:75 | CH02COH |
| 776 | 7750 | RTA22200241F.g.01.1.P.Seq | F | M00026899:711 | CH04MAL |
| 777 | 6923 | RTA22200232F.h.12.1.P.Seq | F | M00022060:69 | CH03MAH |
| 778 | 11552 | RTA22200232F.p.03.1.P.Seq | F | M00022163:38 | CH03MAH |
| 779 | 12448 | RTA22200243F.c.10.1.P.Seq | F | M00027090:58 | CH04MAL |
| 780 | 2944 | RTA22200227F.m.11.1.P.Seq | F | M00006731:22 | CH02COH |
| 781 | 10342 | RTA22200231F.l.03.1.P.Seq | F | M00007981:24 | CH03MAH |
| 782 | 9026 | RTA22200222F.o.20.1.P.Seq | F | M00004304:47 | CH01COH |
| 783 | 10342 | RTA22200238F.m.23.1.P.Seq | F | M00022997:38 | CH03MAH |
| 784 | 6455 | RTA22200235F.f.08.1.P.Seq | F | M00022465:65 | CH03MAH |
| 785 | 6455 | RTA22200232F.b.15.1.P.Seq | F | M00021886:66 | CH03MAH |
| 786 | 3416 | RTA22200227F.k.16.1.P.Seq | F | M00006705:79 | CH02COH |
| 787 | 3416 | RTA22200229F.a.12.1.P.Seq | F | M00006923:85 | CH02COH |
| 788 | 2889 | RTA22200228F.n.19.2.P.Seq | F | M00006894:13 | CH02COH |
| 789 | 7393 | RTA22200241F.l.09.1.P.Seq | F | M00026934:59 | CH04MAL |
| 790 | 14390 | RTA22200244F.i.10.1.P.Seq | F | M00027193:35 | CH04MAL |
| 791 | 661 | RTA22200241F.a.15.1.P.Seq | F | M00026856:311 | CH04MAL |
| 792 | 452992 | RTA22200013F.e.07.1.P.Seq | F | M00056826:212 | CH16COP |
| 793 | 1943 | RTA22200235F.k.21.2.P.Seq | F | M00022528:812 | CH03MAH |
| 794 | 2027 | RTA22200244F.l.20.1.P.Seq | F | M00027207:59 | CH04MAL |
| 795 | 5482 | RTA22200225F.p.15.1.P.Seq | F | M00005565:65 | CH02COH |
| 796 | 650493 | RTA22200007F.c.10.1.P.Seq | F | M00056156:112 | CH15CON |
| 797 | 640318 | RTA22200007F.b.04.1.P.Seq | F | M00056145:24 | CH15CON |
| 798 | 646309 | RTA22200011F.p.23.1.P.Seq | F | M00056661:55 | CH16COP |
| 799 | 4316 | RTA22200248F.e.15.1.P.Seq | F | M00027543:77 | CH04MAL |
| 800 | 449701 | RTA22200012F.d.12.1.P.Seq | F | M00056695:89 | CH16COP |
| 801 | 560367 | RTA22200013F.e.03.1.P.Seq | F | M00056824:310 | CH16COP |
| 802 | 9997 | RTA22200238F.o.18.1.P.Seq | F | M00023015:42 | CH03MAH |
| 803 | 649106 | RTA22200012F.f.03.1.P.Seq | F | M00056707:52 | CH16COP |
| 804 | 461835 | RTA22200007F.b.18.1.P.Seq | F | M00056150:312 | CH15CON |
| 805 | 640590 | RTA22200003F.m.09.1.P.Seq | F | M00055703:35 | CH15CON |
| 806 | 648340 | RTA22200003F.m.09.1.P.Seq | F | M00056139:54 | CH15CON |
| 807 | 554812 | RTA22200014F.g.21.2.P.Seq | F | M00056969:38 | CH16COP |
| 808 | 447035 | RTA22200007F.m.06.1.P.Seq | F | M00056252:511 | CH15CON |
| 809 | 1208 | RTA22200238F.g.03.1.P.Seq | F | M00022908:83 | CH03MAH |
| 810 | 3114 | RTA22200232F.f.24.1.P.Seq | F | M00022015:611 | CH03MAH |
| 811 | 3114 | RTA22200232F.n.22.1.P.Seq | F | M00022149:36 | CH03MAH |
| 812 | 734078 | RTA22200013F.j.12.1.P.Seq | F | M00056870:510 | CH16COP |
| 813 | 450323 | RTA22200015F.o.17.1.P.Seq | F | M00057141:42 | CH16COP |
| 814 | 11567 | RTA22200232F.f.16.1.P.Seq | F | M00022010:81 | CH03MAH |
| 815 | 11567 | RTA22200232F.c.14.1.P.Seq | F | M00021915:510 | CH03MAH |
| 816 | 6660 | RTA22200222F.j.01.1.P.Seq | F | M00003986:712 | CH01COH |
| 817 | 9026 | RTA22200222F.n.12.1.P.Seq | F | M00004198:111 | CH01COH |
| 818 | 185539 | RTA22200243F.b.09.1.P.Seq | F | M00027084:810 | CH04MAL |
| 819 | 3224 | RTA22200222F.d.01.1.P.Seq | F | M00001537:610 | CH01COH |
| 820 | 95700 | RTA22200240F.l.12.1.P.Seq | F | M00026804:43 | CH04MAL |
| 821 | 4439 | RTA22200222F.n.01.1.P.Seq | F | M00004167:411 | CH01COH |
| 822 | 3428 | RTA22200236F.n.08.1.P.Seq | F | M00022667:511 | CH03MAH |
| 823 | 1456 | RTA22200236F.p.05.1.P.Seq | F | M00022681:56 | CH03MAH |
| 824 | 11343 | RTA22200228F.g.03.1.P.Seq | F | M00006822:59 | CH02COH |
| 825 | 729206 | RTA22200012F.k.20.1.P.Seq | F | M00056746:46 | CH16COP |
| 826 | 558371 | RTA22200015F.p.13.1.P.Seq | F | M00057147:11 | CH16COP |
| 827 | 451589 | RTA22200011F.m.21.1.P.Seq | F | M00056635:59 | CH16COP |
| 828 | 404475 | RTA22200012F.f.10.1.P.Seq | F | M00056708:36 | CH16COP |
| 829 | 734582 | RTA22200017F.e.07.1.P.Seq | F | M00057334:61 | CH16COP |
| 830 | 729779 | RTA22200011F.i.11.1.P.Seq | F | M00056596:52 | CH16COP |
| 831 | 555244 | RTA22200023F.l.23.1.P.Seq | F | M00055093:85 | CH17COHLV |
| 832 | 449269 | RTA22200014F.p.17.2.P.Seq | F | M00057035:39 | CH16COP |
| 833 | 4609 | RTA22200227F.a.11.1.P.Seq | F | M00006583:83 | CH02COH |
| 834 | 640318 | RTA22200011F.i.13.1.P.Seq | F | M00056596:56 | CH16COP |
| 835 | 729851 | RTA22200011F.j.22.1.P.Seq | F | M00056610:812 | CH16COP |
| 836 | 11028 | RTA22200230F.a.15.1.P.Seq | F | M00007098:35 | CH02COH |
| 837 | 643924 | RTA22200008F.e.17.1.P.Seq | F | M00056345:53 | CH15CON |
| 838 | 630259 | RTA22200005F.i.07.1.P.Seq | F | M00055908:811 | CH15CON |
| 839 | 11286 | RTA22200230F.k.07.1.P.Seq | F | M00007194:56 | CH02COH |
| 840 | 185651 | RTA22200248F.g.16.1.P.Seq | F | M00027556:710 | CH04MAL |
| 841 | 7379 | RTA22200230F.d.19.1.P.Seq | F | M00007128:76 | CH02COH |
| 842 | 728408 | RTA22200014F.p.13.2.P.Seq | F | M00057033:69 | CH16COP |
| 843 | 646309 | RTA22200007F.e.15.1.P.Seq | F | M00056184:83 | CH15CON |
| 844 | 405073 | RTA22200003F.m.14.1.P.Seq | F | M00055704:47 | CH15CON |
| 845 | 185489 | RTA22200241F.j.24.1.P.Seq | F | M00026926:35 | CH04MAL |
| 846 | 447326 | RTA22200005F.i.15.1.P.Seq | F | M00055909:58 | CH15CON |
| 847 | 111006 | RTA22200227F.c.15.1.P.Seq | F | M00006610:48 | CH02COH |
| 848 | 6863 | RTA22200227F.a.23.1.P.Seq | F | M00006588:86 | CH02COH |
| 849 | 11351 | RTA22200225F.p.12.1.P.Seq | F | M00005563:212 | CH02COH |
| 850 | 401553 | RTA2220000SF.f.13.1.P.Seq | F | M00055884:21 | CH15CON |
| 851 | 504513 | RTA22200007F.h.19.1.P.Seq | F | M00056213:14 | CH15CON |
| 852 | 645979 | RTA22200012F.g.11.1.P.Seq | F | M00056713:78 | CH16COP |
| 853 | 6923 | RTA22200233F.b.21.1.P.Seq | F | M00008023:412 | CH03MAH |
| 854 | 1924 | RTA22200229F.l.18.1.P.Seq | F | M00007034:26 | CH02COH |
| 855 | 5838 | RTA22200230F.f.02.1.P.Seq | F | M00007136:35 | CH02COH |
| 856 | 2062 | RTA22200230F.f.24.1.P.Seq | F | M00007146:611 | CH02COH |
| 857 | 447388 | RTA22200003F.b.06.1.P.Seq | F | M00055581:21 | CH15CON |
| 858 | 12419 | RTA22200241F.c.04.1.P.Seq | F | M00026865:711 | CH04MAL |
| 859 | 3224 | RTA22200222F.c.24.1.P.Seq | F | M00001537:610 | CH01COH |
| 860 | 5474 | RTA22200230F.i.23.1.P.Seq | F | M00007174:46 | CH02COH |
| 861 | 3522 | RTA22200227F.f.23.1.P.Seq | F | M00006650:45 | CH02COH |
| 862 | 731785 | RTA22200012F.o.21.1.P.Seq | F | M00056777:67 | CH16COP |
| 863 | 3765 | RTA22200228F.d.10.1.P.Seq | F | M00006803:37 | CH02COH |
| 864 | 640323 | RTA22200012F.a.10.1.P.Seq | F | M00056664:76 | CH16COP |
| 865 | 379105 | RTA22200012F.i.11.1.P.Seq | F | M00056728:85 | CH16COP |
| 866 | 448029 | RTA22200012F.n.03.1.P.Seq | F | M00056764:58 | CH16COP |
| 867 | 650476 | RTA22200005F.h.07.1.P.Seq | F | M00055893:35 | CH15CON |
| 868 | 640525 | RTA22200007F.f.12.1.P.Seq | F | M00056192:82 | CH15CON |
| 869 | 390124 | RTA22200007F.n.09.1.P.Seq | F | M00056267:52 | CH15CON |
| 870 | 464029 | RTA22200023F.p.21.1.P.Seq | F | M00055137:34 | CH17COHLV |
| 871 | 468109 | RTA22200005F.e.18.1.P.Seq | F | M00055880:612 | CH15CON |
| 872 | 21669 | RTA22200023F.h.20.1.P.Seq | F | M00055064:512 | CH17COHLV |
| 873 | 651088 | RTA22200007F.j.07.2.P.Seq | F | M00056224:210 | CH15CON |
| 874 | 2737 | RTA22200023F.d.15.1.P.Seq | F | M00055039:71 | CH17COHLV |
| 875 | 556421 | RTA22200005F.e.14.1.P.Seq | F | M00055879:44 | CH15CON |
| 876 | 452245 | RTA22200023F.c.23.1.P.Seq | F | M00055034:81 | CH17COHLV |
| 877 | 447539 | RTA22200005F.e.22.1.P.Seq | F | M00055882:19 | CH15CON |
| 878 | 546642 | RTA22200014F.o.20.2.P.Seq | F | M00057029:312 | CH16COP |
| 879 | 236368 | RTA22200006F.j.23.2.P.Seq | F | M00056077:56 | CH15CON |
| 880 | 644523 | RTA22200012F.b.12.1.P.Seq | F | M00056673:56 | CH16COP |
| 881 | 729173 | RTA22200012F.k.02.1.P.Seq | F | M00056739:411 | CH16COP |
| 882 | 8315 | RTA22200231F.a.06.1.P.Seq | F | M00007927:31 | CH03MAH |
| 883 | 450463 | RTA22200007F.i.11.2.P.Seq | F | M00056218:73 | CH15C0N |
| 884 | 650856 | RTA22200012F.o.13.1.P.Seq | F | M00056775:31 | CH16COP |
| 885 | 648109 | RTA22200005F.i.14.1.P.Seq | F | M00055909:71 | CH15CON |
| 886 | 726644 | RTA22200013F.d.19.1.P.Seq | F | M00056822:711 | CH16COP |
| 887 | 727224 | RTA22200013F.h.19.1.P.Seq | F | M00056859:412 | CH16COP |
| 888 | 557906 | RTA22200023F.h.18.1.P.Seq | F | M00055063:71 | CH17COHLV |
| 889 | 502683 | RTA22200007F.e.22.1.P.Seq | F | M00056185:46 | CH15CON |
| 890 | 728408 | RTA22200011F.i.06.1.P.Seq | F | M00056594:310 | CH16COP |
| 891 | 647952 | RTA22200005F.j.11.1.P.Seq | F | M00055919:16 | CH15CON |
| 892 | 639991 | RTA22200009F.l.23.2.P.Seq | F | M00042846:49 | CH16COP |
| 893 | 735346 | RTA22200016F.m.21.1.P.Seq | F | M00057266:44 | CH16COP |
| 894 | 102655 | RTA22200007F.i.23.2.P.Seq | F | M00056222:62 | CH15CON |
| 895 | 553629 | RTA22200012F.o.03.1.P.Seq | F | M00056772:58 | CH16COP |
| 896 | 1609 | RTA22200226F.i.23.1.P.Seq | F | M00005708:27 | CH02COH |
| 897 | 641884 | RTA22200005F.l.16.1.P.Seq | F | M00055937:32 | CH15CON |
| 898 | 648872 | RTA22200007F.p.10.1.P.Seq | F | M00056286:112 | CH15CON |
| 899 | 644242 | RTA22200005F.i.20.1.P.Seq | F | M00055911:56 | CH15CON |
| 900 | 63559 | RTA22200244F.f.14.1.P.Seq | F | M00027183:21 | CH04MAL |
| 901 | 550108 | RTA22200012F.o.24.1.P.Seq | F | M00056779:810 | CH16COP |
| 902 | 374306 | RTA22200011F.n.05.1.P.Seq | F | M00056639:52 | CH16COP |
| 903 | 5838 | RTA22200226F.c.19.1.P.Seq | F | M00005621:88 | CH02COH |
| 904 | 645530 | RTA22200006F.k.07.2.P.Seq | F | M00056079:67 | CH15CON |
| 905 | 649732 | RTA22200012F.b.05.1.P.Seq | F | M00056669:77 | CH16COP |
| 906 | 649143 | RTA22200007F.p.01.1.P.Seq | F | M00056283:52 | CH15CON |
| 907 | 7571 | RTA22200225F.h.24.1.P.Seq | F | M00005481:36 | CH02COH |
| 908 | 4572 | RTA22200236F.j.09.1.P.Seq | F | M00022651:31 | CH03MAH |
| 909 | 2147 | RTA22200229F.j.14.1.P.Seq | F | M00007006:11 | CH02COH |
| 910 | 462659 | RTA22200008F.h.10.1.P.Seq | F | M00056475:62 | CH15CON |
| 911 | 727723 | RTA22200012F.m.21.1.P.Seq | F | M00056761:65 | CH16COP |
| 912 | 2636 | RTA22200226F.g.21.1.P.Seq | F | M00005657:112 | CH02COH |
| 913 | 500959 | RTA22200005F.k.21.1.P.Seq | F | M00055931:51 | CH15CON |
| 914 | 3428 | RTA22200231F.f.07.1.P.Seq | F | M00007954:24 | CH03MAH |
| 915 | 734929 | RTA22200011F.h.24.1.P.Seq | F | M00056592:47 | CH16COP |
| 916 | 453592 | RTA22200001F.g.19.1.P.Seq | F | M00042706:14 | CH15CON |
| 917 | 15414 | RTA22200026F.d.21.1.P.Seq | F | M00055423:810 | CH17COHLV |
| 918 | 648959 | RTA22200002F.m.22.1.P.Seq | F | M00055542:19 | CH15CON |
| 919 | 453470 | RTA22200007F.g.06.1.P.Seq | F | M00056198:47 | CH15CON |
| 920 | 649272 | RTA22200007F.k.03.2.P.Seq | F | M00056232:56 | CH15CON |
| 921 | 1699 | RTA22200012F.p.06.1.P.Seq | F | M00056781:512 | CH16COP |
| 922 | 649719 | RTA22200006F.m.21.2.P.Seq | F | M00056098:81 | CH15CON |
| 923 | 562805 | RTA22200023F.d.08.1.P.Seq | F | M00055037:51 | CH17COHLV |
| 924 | 452204 | RTA22200001F.p.24.1.P.Seq | F | M00054918:311 | CH15CON |
| 925 | 549178 | RTA22200023F.d.22.1.P.Seq | F | M00055041:52 | CH17COHLV |
| 926 | 639177 | RTA22200015F.n.24.1.P.Seq | F | M00057134:710 | CH16COP |
| 927 | 562550 | RTA22200022F.i.05.1.P.Seq | F | M00054941:74 | CH17COHLVI |
| 928 | 561807 | RTA22200004F.l.07.1.P.Seq | F | M00055808:711 | CH15CON |
| 929 | 641373 | RTA22200006F.m.23.2.P.Seq | F | M00056099:79 | CH15CON |
| 930 | 514418 | RTA22200022F.a.15.1.P.Seq | F | M00054870:49 | CH17COHLV |
| 931 | 567078 | RTA22200006F.b.18.2.P.Seq | F | M00056007:111 | CH15CON |
| 932 | 643061 | RTA22200006F.n.01.2.P.Seq | F | M00056099:811 | CH15CON |
| 933 | 549160 | RTA22200020F.i.09.1.P.Seq | F | M00054638:38 | CH17COHLV |
| 934 | 449269 | RTA22200009F.e.07.1.P.Seq | F | M00042770:212 | CH16COP |
| 935 | 453082 | RTA22200001F.e.03.1.P.Seq | F | M00042564:811 | CH15CON |
| 936 | 418135 | RTA22200026F.a.09.1.P.Seq | F | M00055406:45 | CH17COHLV |
| 937 | 2783 | RTA22200023F.b.23.1.P.Seq | F | M00055027:47 | CH17COHLV |
| 938 | 549435 | RTA22200007F.j.06.2.P.Seq | F | M00056223:73 | CH15CON |
| 939 | 446614 | RTA22200009F.i.13.2.P.Seq | F | M00042816:64 | CH16COP |
| 940 | 449477 | RTA22200012F.p.04.1.P.Seq | F | M00056780:32 | CH16COP |
| 941 | 454380 | RTA22200013F.c.09.1.P.Seq | F | M00056815:21 | CH16COP |
| 942 | 450914 | RTA22200013F.c.05.1.P.Seq | F | M00056812:58 | CH16COP |
| 943 | 736860 | RTA22200016F.p.14.1.P.Seq | F | M00057283:56 | CH16COP |
| 944 | 727224 | RTA22200011F.h.19.1.P.Seq | F | M00056592:64 | CH16COP |
| 945 | 644242 | RTA22200006F.a.19.2.P.Seq | F | M00056000:612 | CH15CON |
| 946 | 562550 | RTA22200022F.p.09.1.P.Seq | F | M00055002:54 | CH17COHLV |
| 947 | 649148 | RTA22200007F.j.24.2.P.Seq | F | M00056231:79 | CH15CON |
| 948 | 375889 | RTA22200023F.c.13.1.P.Seq | F | M00055032:16 | CH17COHLV |
| 949 | 449437 | RTA22200009F.e.03.1.P.Seq | F | M00042767:42 | CH16COP |
| 950 | 449044 | RTA22200006F.b.07.2.P.Seq | F | M00056003:56 | CH15CON |
| 951 | 555318 | RTA22200022F.e.11.1.P.Seq | F | M00054903:312 | CH17COHLV |
| 952 | 456764 | RTA22200005F.k.20.1.P.Seq | F | M00055931:31 | CH15CON |
| 953 | 11567 | RTA22200231F.g.22.1.P.Seq | F | M00007965:710 | CH03MAH |
| 954 | 3522 | RTA22200229F.j.18.1.P.Seq | F | M00007007:85 | CH02COH |
| 955 | 456528 | RTA22200016F.p.05.1.P.Seq | F | M00057280:16 | CH16COP |
| 956 | 639142 | RTA22200013F.m.02.1.P.Seq | F | M00056887:68 | CH16COP |
| 957 | 446371 | RTA22200001F.e.10.1.P.Seq | F | M00042567:31 | CH15CON |
| 958 | 554742 | RTA22200026F.a.03.1.P.Seq | F | M00055405:85 | CH17COHLV |
| 959 | 448029 | RTA22200009F.m.10.1.P.Seq | F | M00042848:712 | CH16COP |
| 960 | 551380 | RTA22200022F.j.23.1.P.Seq | F | M00054952:86 | CH17COHLV |
| 961 | 551527 | RTA22200020F.n.22.1.P.Seq | F | M00654689:512 | CH17COHLV |
| 962 | 729295 | RTA22200014F.a.21.2.P.Seq | F | M00056925:37 | CH16COP |
| 963 | 349744 | RTA22200022F.m.17.1.P.Seq | F | M00054975:34 | CH17COHLV |
| 964 | 648996 | RTA22200004F.d.22.1.P.Seq | F | M00055768:25 | CH15CON |
| 965 | 447126 | RTA22200001F.e.18.1.P.Seq | F | M00042573:17 | CH15CON |
| 966 | 730866 | RTA22200013F.p.20.1.P.Seq | F | M00056916:22 | CH16COP |
| 967 | 420686 | RTA22200020F.o.02.1.P.Seq | F | M00054692:41 | CH17COHLV |
| 968 | 451753 | RTA22200017F.b.07.1.P.Seq | F | M00057304:51 | CH16COP |
| 969 | 451380 | RTA22200021F.d.12.2.P.Seq | F | M00054743:52 | CH17COHLV |
| 970 | 645530 | RTA22200003F.l.11.1.P.Seq | F | M00055689:67 | CH15CON |
| 971 | 554703 | RTA22200016F.m.22.1.P.Seq | F | M00057266:712 | CH16COP |
| 972 | 562835 | RTA22200015F.n.20.1.P.Seq | F | M00057134:11 | CH16COP |
| 973 | 732764 | RTA22200016F.m.14.1.P.Seq | F | M00057259:28 | CH16COP |
| 974 | 556216 | RTA22200019F.l.17.1.P.Seq | F | M00054534:42 | CH17COHLV |
| 975 | 728779 | RTA22200017F.c.19.1.P.Seq | F | M00057318:29 | CH16COP |
| 976 | 414739 | RTA22200002F.n.19.1.P.Seq | F | M00055547:410 | CH15CON |
| 977 | 551514 | RTA22200022F.k.05.1.P.Seq | F | M00054953:710 | CH17COHLV |
| 978 | 550107 | RTA22200023F.p.02.1.P.Seq | F | M00055130:71 | CH17COHLV |
| 979 | 726786 | RTA22200017F.a.10.1.P.Seq | F | M00057291:26 | CH16COP |
| 980 | 456747 | RTA22200001F.f.23.1.P.Seq | F | M00042700:11 | CH15CON |
| 981 | 562550 | RTA22200023F.n.13.1.P.Seq | F | M00055111:43 | CH17COHLV |
| 982 | 549722 | RTA22200002F.p.13.1.P.Seq | F | M00055560:66 | CH15CON |
| 983 | 640525 | RTA22200004F.i.10.1.P.Seq | F | M00055796:510 | CH15CON |
| 984 | 455542 | RTA22200009F.f.23.1.P.Seq | F | M00042787:59 | CH16COP |
| 985 | 9436 | RTA22200016F.n.12.1.P.Seq | F | M00057270:54 | CH16COP |
| 986 | 380284 | RTA22200004F.c.17.1.P.Seq | F | M00055755:83 | CH15CON |
| 987 | 556260 | RTA22200020F.p.08.1.P.Seq | F | M00054707:55 | CH17COHLV |
| 988 | 650476 | RTA22200013F.p.21.1.P.Seq | F | M00056916:64 | CH16COP |
| 989 | 554500 | RTA22200006F.n.14.2.P.Seq | F | M00056103:812 | CH15CON |
| 990 | 422375 | RTA22200016F.n.16.1.P.Seq | F | M00057272:23 | CH16COP |
| 991 | 456528 | RTA22200019F.l.23.1.P.Seq | F | M00054535:89 | CH17COHLV |
| 992 | 644190 | RTA22200009F.m.23.1.P.Seq | F | M00042853:73 | CH16COP |
| 993 | 554080 | RTA22200014F.o.19.3.P.Seq | F | M00057028:49 | CH16COP |
| 994 | 546705 | RTA22200021F.i.06.3.P.Seq | F | M00054781:24 | CH17COHLV |
| 995 | 558337 | RTA22200021F.a.02.2.P.Seq | F | M00054720:611 | CH17COHLV |
| 996 | 449269 | RTA22200014F.p.17.3.P.Seq | F | M00057035:39 | CH16COP |
| 997 | 645799 | RTA22200014F.d.22.2.P.Seq | F | M00056952:84 | CH16COP |
| 998 | 456506 | RTA22200001F.l.10.1.P.Seq | F | M00042889:19 | CH15CON |
| 999 | 218416 | RTA22200026F.c.09.1.P.Seq | F | M00055414:111 | CH17COHLV |
| 1000 | 455820 | RTA22200023F.m.12.1.P.Seq | F | M00055097:76 | CH17COHLV |
| 1001 | 554703 | RTA22200024F.p.19.1.P.Seq | F | M00055262:211 | CH17COHLV |
| 1002 | 650204 | RTA22200008F.c.16.1.P.Seq | F | M00056313:67 | CH15CON |
| 1003 | 456808 | RTA22200014F.a.19.2.P.Seq | F | M00056924:26 | CH16COP |
| 1004 | 420686 | RTA22200004F.n.01.1.P.Seq | F | M00055821:16 | CH15CON |
| 1005 | 378373 | RTA22200023F.n.20.1.P.Seq | F | M00055114:111 | CH17COHLV |
| 1006 | 463824 | RTA22200004F.a.22.1.P.Seq | F | M00055740:69 | CH15CON |
| 1007 | 24939 | RTA22200016F.i.15.1.P.Seq | F | M00057229:66 | CH16COP |
| 1008 | 556561 | RTA22200022F.n.08.1.P.Seq | F | M00054981:36 | CH17COHLV |
| 1009 | 380406 | RTA22200001F.l.13.1.P.Seq | F | M00042890:38 | CH15CON |
| 1010 | 456764 | RTA22200004F.a.10.1.P.Seq | F | M00055736:46 | CH15CON |
| 1011 | 725703 | RTA22200016F.a.04.1.P.Seq | F | M00057154:46 | CH16COP |
| 1012 | 185465 | RTA22200009F.g.10.1.P.Seq | F | M00042793:76 | CH16COP |
| 1013 | 5830 | RTA22200013F.m.20.1.P.Seq | F | M00056894:76 | CH16COP |
| 1014 | 539955 | RTA22200013F.o.22.1.P.Seq | F | M00056909:49 | CH16COP |
| 1015 | 640747 | RTA22200002F.o.17.1.P.Seq | F | M00055553:37 | CH16COP |
| 1016 | 500630 | RTA22200013F.n.12.1.P.Seq | F | M00056901:16 | CH16COP |
| 1017 | 448511 | RTA22200022F.n.14.1.P.Seq | F | M00054984:37 | CH17COHLV |
| 1018 | 405073 | RTA22200002F.b.21.1.P.Seq | F | M00055438:36 | CH15CON |
| 1019 | 641439 | RTA22200003F.l.08.1.P.Seq | F | M00055688:24 | CH15CON |
| 1020 | 406092 | RTA22200004F.a.20.1.P.Seq | F | M00055740:212 | CH15CON |
| 1021 | 559806 | RTA22200022F.o.02.1.P.Seq | F | M00054987:32 | CH17COHLV |
| 1022 | 380284 | RTA22200002F.l.11.1.P.Seq | F | M00055529:22 | CH15COP |
| 1023 | 560700 | RTA22200026F.f.08.1.P.Seq | F | M00055475:78 | CH17COHLV |
| 1024 | 552879 | RTA22200024F.m.13.1.P.Seq | F | M00055242:11 | CH17COHLV |
| 1025 | 640590 | RTA22200003F.l.14.1.P.Seq | F | M00055692:57 | CH15CON |
| 1026 | 641683 | RTA22200003F.k.24.1.P.Seq | F | M00055685:51 | CH15CON |
| 1027 | 648934 | RTA22200003F.a.23.1.P.Seq | F | M00055578:89 | CH15CON |
| 1028 | 557948 | RTA22200021F.g.09.3.P.Seq | F | M00054766:24 | CH17COHLV |
| 1029 | 377094 | RTA22200021F.d.05.2.P.Seq | F | M00054741:510 | CH17COHLV |
| 1030 | 449617 | RTA22200026F.c.15.1.P.Seq | F | M00055415:811 | CH17COHLV |
| 1031 | 978 | RTA22200004F.m.17.1.P.Seq | F | M00055820:58 | CH15CON |
| 1032 | 607430 | RTA22200024F.n.10.1.P.Seq | F | M00055247:111 | CH17COHLV |
| 1033 | 641837 | RTA22200003F.b.20.1.P.Seq | F | M00055586:65 | CH15CON |
| 1034 | 449750 | RTA22200021F.h.08.3.P.Seq | F | M00054773:112 | CH17COHLV |
| 1035 | 646780 | RTA22200004F.m.23.1.P.Seq | F | M00055820:710 | CH15CON |
| 1036 | 546642 | RTA22200014F.o.20.3.P.Seq | F | M00057029:312 | CH16COP |
| 1037 | 642906 | RTA22200014F.i.13.2.P.Seq | F | M00056985:35 | CH16COP |
| 1038 | 552879 | RTA22200024F.g.10.1.P.Seq | F | M00055196:19 | CH17COHLV |
| 1039 | 644205 | RTA22200003F.d.03.1.P.Seq | F | M00055602:710 | CH15CON |
| 1040 | 506744 | RTA22200021F.n.01.2.P.Seq | F | M00054841:27 | CH17COHLV |
| 1041 | 557797 | RTA22200024F.c.03.1.P.Seq | F | M00055154:64 | CH17COHLV |
| 1042 | 640356 | RTA22200004F.h.18.1.P.Seq | F | M00055792:57 | CH15CON |
| 1043 | 462659 | RTA22200001F.i.16.1.P.Seq | F | M00042732:79 | CH15CON |
| 1044 | 645633 | RTA22200008F.a.01.1.P.Seq | F | M00056291:25 | CH15CON |
| 1045 | 237288 | RTA22200002F.g.19.1.P.Seq | F | M00055495:63 | CH15CON |
| 1046 | 454343 | RTA22200016F.d.13.1.P.Seq | F | M00057181:46 | CH16COP |
| 1047 | 386543 | RTA22200024F.n.20.1.P.Seq | F | M00055198:67 | CH17COHLV |
| 1048 | 446404 | RTA22200003F.b.10.1.P.Seq | F | M00055582:54 | CH15CON |
| 1049 | 456528 | RTA22200014F.n.13.2.P.Seq | F | M00057019:82 | CH16COP |
| 1050 | 456528 | RTA22200015F.l.08.1.P.Seq | F | M00057118:32 | CH16COP |
| 1051 | 452781 | RTA22200004F.o.03.1.P.Seq | F | M00055827:36 | CH15CON |
| 1052 | 551671 | RTA22200021F.b.20.1.PSeq | F | M00054729:51 | CH17COHLV |
| 1053 | 644242 | RTA22200004F.h.08.1.P.Seq | F | M00055791:45 | CH15CON |
| 1054 | 561892 | RTA22200025F.n.14.2.P.Seq | F | M00055391:76 | CH17COHLV |
| 1055 | 450429 | RTA22200004F.e.09.1.P.Seq | F | M00055771:41 | CH15CON |
| 1056 | 533588 | RTA22200001F.k.13.1.P.Seq | F | M00042881:38 | CH15CON |
| 1057 | 553877 | RTA22200004F.f.03.1.P.Seq | F | M00055775210 | CH15CON |
| 1058 | 650195 | RTA22200004F.f.23.1.P.Seq | F | M00055782:62 | CH15CON |
| 1059 | 934861 | RTA22200020F.b.22.1.P.Seq | F | M00054580:411 | CH17COHLV |
| 1060 | 650195 | RTA22200001F.k.22.1.P.Seq | F | M00042886:61 | CH15CON |
| 1061 | 562835 | RTA22200025F.m.22.2.P.Seq | F | M00055388:78 | CH17COHLV |
| 1062 | 736816 | RTA22200015F.b.20.1.P.Seq | F | M00057052:79 | CH16COP |
| 1063 | 403632 | RTA22200020F.b.08.1.P.Seq | F | M00054575:31 | CH17COHLV |
| 1064 | 390124 | RTA22200021F.n.17.2.P.Seq | F | M00054849:811 | CH17COHLV |
| 1065 | 390124 | RTA22200016F.i.16.1.P.Seq | F | M00057230:412 | CH16COP |
| 1066 | 422687 | RTA22200015F.e.14.1.P.Seq | F | M00057072:52 | CH16COP |
| 1067 | 394413 | RTA22200001F.k.11.1.P.Seq | F | M00042750:29 | CH15CON |
| 1068 | 549178 | RTA22200020F.a.18.1.P.Seq | F | M00054571:31 | CH17COHLV |
| 1069 | 453079 | RTA22200004F.e.Al.1.P.Seq | F | M00055771:111 | CH15CON |
| 1070 | 463824 | RTA22200001F.j.03.1.P.Seq | F | M00042735:17 | CH15CON |
| 1071 | 736595 | RTA22200016F.d.16.1.P.Seq | F | M0057182:211 | CH16COP |
| 1072 | 102655 | RTA22200004F.m.02.1.P.Seq | F | M00055816:61 | CH15CON |
| 1073 | 448606 | RTA22200014F.j.14.2.P.Seq | F | M00056994:33 | CH16COP |
| 1074 | 504513 | RTA22200004F.n.12.1.P.Seq | F | M00055823:411 | CH15CON |
| 1075 | 20036 | RTA22200004F.f.12.1.P.Seq | F | M00055779:12 | CH15CON |
| 1076 | 530883 | RTA22200016F.d.08.1.P.Seq | F | M00057180:811 | CH16COP |
| 1077 | 447126 | RTA22200004F.o.18.1.P.Seq | F | M00055832:512 | CH15CON |
| 1078 | 556561 | RTA22200025F.d.13.1.P.Seq | F | M00055302:62 | CH17COHLV |
| 1079 | 455096 | RTA22200020F.e.15.1.P.Seq | F | M00054600:77 | CH17COHLV |
| 1080 | 549320 | RTA22200020F.g.16.1.P.Seq | F | M00054621:411 | CH17COHLV |
| 1081 | 560984 | RTA22200025F.d.20.1.P.Seq | F | M00055306:79 | CH17COHLV |
| 1082 | 450791 | RTA22200018F.k.03.1.P.Seq | F | M00043338:13 | CH17COHLV |
| 1083 | 16556 | RTA22200025F.c.02.1.P.Seq | F | M00055281:58 | CH17COHLV |
| 1084 | 402707 | RTA22200018F.d.23.1.P.Seq | F | M00042520:64 | CH17COHLV |
| 1085 | 557903 | RTA22200025F.b.15.1.P.Seq | F | M00055279:78 | CH17COHLV |
| 1086 | 451243 | RTA22200018F.i.18.1.P.Seq | F | M00043324:44 | CH17COHLV |
| 1087 | 452506 | RTA22200025F.b.06.1.P.Seq | F | M00055274:62 | CH17COHLV |
| 1088 | 554703 | RTA22200025F.g.23.1.P.Seq | F | M00055345:811 | CH17COHLV |
| 1089 | 449580 | RTA22200018F.c.03.1.P.Seq | F | M00042450:810 | CH17COHLV |
| 1090 | 3316 | RTA22200025F.i.02.1.P.Seq | F | M00055356:36 | CH17COHLV |
| 1091 | 97507 | RTA22200025F.i.22.1.P.Seq | F | M00055364:51 | CH17COHLV |
| 1092 | 556216 | RTA22200025F.k.07.1.P.Seq | F | M00055373:410 | CH17COHLV |
| 1093 | 185401 | RTA22200250F.d.22.1.P.Seq | F | M00027808:710 | CH04MAL |
| 1094 | 3758 | RTA22200248F.o.08.1.P.Seq | F | M00027605:55 | CH04MAL |
| 1095 | 95700 | RTA22200248F.l.15.1.P.Seq | F | M00027588:16 | CH04MAL |
| 1096 | 2478 | RTA22200250F.d.12.1.P.Seq | F | M00027803:810 | CH04MAL |
| 1097 | 550267 | RTA22200011F.d.14.1.P.Seq | F | M00056552:210 | CH16COP |
| 1098 | 185652 | RTA22200250F.c.19.1.P.Seq | F | M00027786:21 | CH04MAL |
| 1099 | 55798 | RTA22200250F.a.04.1.P.Seq | F | M00027757:26 | CH04MAL |
| 1100 | 5078 | RTA22200011F.a.19.1.P.Seq | F | M00056529:89 | CH16COP |
| 1101 | 9784 | RTA22200249F.h.22.1.P.Seq | F | M00027681:42 | CH04MAL |
| 1102 | 2245 | RTA22200234F.e.08.1.P.Seq | F | M00022216:46 | CH03MAH |
| 1103 | 11606 | RTA22200234F.e.19.1.P.Seq | F | M00022221:46 | CH03MAH |
| 1104 | 2245 | RTA22200234F.e.21.1.P.Seq | F | M00022221:46 | CH03MAH |
| 1105 | 551172 | RTA22200011F.b.19.1.P.Seq | F | M00056537:19 | CH16COP |
| 1106 | 729175 | RTA22200010F.i.01.1.P.Seq | F | M00056420:47 | CH16COP |
| 1107 | 6317 | RTA22200224F.e.13.1.P.Seq | F | M00004971:74 | CH02COH |
| 1108 | 2478 | RTA22200234F.f.21.1.P.Seq | F | M00022235:311 | CH03MAH |
| 1109 | 4727 | RTA22200234F.f.10.1.P.Seq | F | M00022231:512 | CH03MAH |
| 1110 | 185598 | RTA22200249F.p.13.1.P.Seq | F | M00027747:41 | CH04MAL |
| 1111 | 736349 | RTA22200010F.j.16.1.P.Seq | F | M00056434:571 | CH16COP |
| 1112 | 8001 | RTA22200224F.g.15.1.P.Seq | F | M00005313:22 | CH02COH |
| 1113 | 189561 | RTA22200010F.i.20.1.P.Seq | F | M00056425:88 | CH16COP |
| 1114 | 728131 | RTA22200010F.n.22.1.P.Seq | F | M00056507:210 | CH16COP |
| 1115 | 560984 | RTA22200019F.k.07.1.P.Seq | F | M00054521:64 | CH17COHLV |
| 1116 | 549945 | RTA22200019F.j.03.1.P.Seq | F | M00054513:112 | CH17COHLV |
| 1117 | 554785 | RTA22200019F.g.21.1.P.Seq | F | M00054499:511 | CH17COHLV |
| 1118 | 554785 | RTA22200019F.h.01.1.P.Seq | F | M00054499:511 | CH17COHLV |
| 1119 | 551235 | RTA22200019F.e.14.1.P.Seq | F | M00043506:89 | CH17COHLV |
| 1120 | 2634 | RTA22200237F.e.18.1.P.Seq | F | M00022720:39 | CH03MAH |
| 1121 | 548858 | RTA22200019F.g.06.1.P.Seq | F | M00054493:110 | CH17COHLV |
| 1122 | 15625 | RTA22200005F.n.15.1.P.Seq | F | M00055966:46 | CH15CON |
| 1123 | 649259 | RTA22200006F.a.21.2.P.Seq | F | M00056000:49 | CH15CON |
| 1124 | 55267 | RTA22200005F.b.15.1.P.Seq | F | M00055856:67 | CH15CON |
| 1125 | 7436 | RTA22200237F.b.08.1.P.Seq | F | M00022697:412 | CH03MAH |
| 1126 | 451794 | RTA22200005F.c.13.1.P.Seq | F | M00055866:12 | CH15CON |
| 1127 | 5744 | RTA22200227F.l.15.1.P.Seq | F | M00006719:512 | CH02COH |
| 1128 | 3516 | RTA22200228F.n.13.2.P.Seq | F | M00006892:69 | CH02COH |
| 1129 | 730555 | RTA22200014F.j.23.1.P.Seq | F | M00056997:89 | CH16COP |
| 1130 | 3085 | RTA22200237F.n.05.1.P.Seq | F | M00022829:86 | CH03MAH |
| 1131 | 638854 | RTA22200005F.b.09.1.P.Seq | F | M00055854:54 | CH15CON |
| 1132 | 7379 | RTA22200225F.l.06.1.P.Seq | F | M00005501:79 | CH02COH |
| 1133 | 185562 | RTA22200248F.i.11.1.P.Seq | F | M00027571:311 | CH04MAL |
| 1134 | 452491 | RTA22200005F.a.16.1.P.Seq | F | M00055849:48 | CH15CON |
| 1135 | 646248 | RTA22200005F.a.14.1.P.Seq | F | M00055848:86 | CH15CON |
| 1136 | 6056 | RTA22200235F.f.14.1.P.Seq | F | M00022468:512 | CH03MAH |
| 1137 | 643103 | RTA22200005F.d.12.1.P.Seq | F | M00055873:211 | CH15CON |
| 1138 | 6923 | RTA22200237F.h.10.1.P.Seq | F | M00022741:211 | CH03MAH |
| 1139 | 6923 | RTA22200237F.h.16.1.P.Seq | F | M00022745:37 | CH03MAH |
| 1140 | 901 | RTA22200237F.o.03.1.P.Seq | F | M00022831:34 | CH03MAH |
| 1141 | 901 | RTA22200237F.n.23.1.P.Seq | F | M00022831:19 | CH03MAH |
| 1142 | 367 | RTA22200236F.h.18.1.P.Seq | F | M00022641:310 | CH03MAH |
| 1143 | 4043 | RTA22200228F.l.13.2.P.Seq | F | M00006873:21 | CH02COH |
| 1144 | 3299 | RTA22200236F.h.19.1.P.Seq | F | M00022641:56 | CH03MAH |
| 1145 | 11881 | RTA22200238F.e.15.1.P.Seq | F | M00022899:39 | CH03MAH |
| 1146 | 9113 | RTA22200230F.l.04.1.P.Seq | F | M00007204:712 | CH02COH |
| 1147 | 185460 | RTA22200243F.p.24.1.P.Seq | F | M00027165:611 | CH04MAL |
| 1148 | 185716 | RTA22200241F.d.03.1.P.Seq | F | M00026873:511 | CH04MAL |
| 1149 | 5753 | RTA22200227F.o.22.1.P.Seq | F | M00006756:68 | CH02COH |
| 1150 | 24939 | RTA22200012F.e.06.1.P.Seq | F | M00056701:58 | CH16COP |
| 1151 | 649684 | RTA22200007F.a.14.1.P.Seq | F | M00056140:87 | CH15CON |
| 1152 | 642109 | RTA22200012F.h.03.1.P.Seq | F | M00056717:34 | CH16COP |
| 1153 | 15035 | RTA22200007F.l.11.1.P.Seq | F | M00056246:23 | CH15CON |
| 1154 | 649354 | RTA22200007F.a.15.1.P.Seq | F | M00056140:57 | CH15CON |
| 1155 | 4465 | RTA22200228F.e.19.1.P.Seq | F | M00006811:412 | CH02COH |
| 1156 | 647952 | RTA22200007F.b.02.1.P.Seq | F | M00056144:39 | CH15CON |
| 1157 | 455601 | RTA22200005F.p.18.1.P.Seq | F | M00055990:25 | CH15CON |
| 1158 | 641901 | RTA22200005F.p.07.1.P.Seq | F | M00055984:32 | CH15CON |
| 1159 | 446878 | RTA22200009F.b.21.2.P.Seq | F | M00042466:86 | CH16COP |
| 1160 | 7436 | RTA22200232F.h.08.1.P.Seq | F | M00022058:11 | CH03MAH |
| 1161 | 2245 | RTA22200230F.i.03.1.P.Seq | F | M00007166:56 | CH02COH |
| 1162 | 3531 | RTA22200227F.o.01.1.P.Seq | F | M00006746:26 | CH02COH |
| 1163 | 9625 | RTA22200240F.k.21.1.P.Seq | F | M00023520:77 | CH04MAL |
| 1164 | 727489 | RTA22200012F.l.19.1.P.Seq | F | M00056754:14 | CH16COP |
| 1165 | 159925 | RTA22200240F.j.14.1.P.Seq | F | M00023428:43 | CH04MAL |
| 1166 | 645210 | RTA22200012F.g.17.1.P.Seq | F | M00056715:54 | CH16COP |
| 1167 | 157629 | RTA22200235F.d.24.1.P.Seq | F | M00022453:84 | CH03MAH |
| 1168 | 8375 | RTA22200231F.l.07.1.P.Seq | F | M00007982:611 | CH03MAH |
| 1169 | 4319 | RTA22200230F.e.02.1.P.Seq | F | M00007129:68 | CH02COH |
| 1170 | 4045 | RTA22200231F.n.07.1.P.Seq | F | M00007992:78 | CH03MAH |
| 1171 | 185642 | RTA22200240F.p.21.1.P.Seq | F | M00026848:711 | CH04MAL |
| 1172 | 7436 | RTA22200238F.l.11.1.P.Seq | F | M00022974:410 | CH03MAH |
| 1173 | 3531 | RTA22200227F.n.24.1.P.Seq | F | M00006746:26 | CH02COH |
| 1174 | 644776 | RTA22200012F.g.21.1.P.Seq | F | M00056715:58 | CH02COH |
| 1175 | 8354 | RTA22200238F.d.13.1.P.Seq | F | M00022892:77 | CH03MAH |
| 1176 | 2099 | RTA22200243F.f.05.1.P.Seq | F | M00027111:84 | CH04MAL |
| 1177 | 449956 | RTA22200011F.l.18.1.P.Seq | F | M00056624:85 | CH16COP |
| 1178 | 649106 | RTA22200003F.o.09.1.P.Seq | F | M00055723:55 | CH15CON |
| 1179 | 452414 | RTA22200005F.i.09.1.P.Seq | F | M00055908:512 | CH15CON |
| 1180 | 732712 | RTA22200011F.k.21.1.P.Seq | F | M00056616:110 | CH16COP |
| 1181 | 185562 | RTA22200225F.m.01.1.P.Seq | F | M00026938:64 | CH04MAL |
| 1182 | 3516 | RTA22200241F.i.17.1.P.Seq | F | M00005485:19 | CH02COH |
| 1183 | 185562 | RTA22200241F.l.24.1.P.Seq | F | M00026938:64 | CH04MAL |
| 1184 | 185460 | RTA22200241F.a.08.1.P.Seq | F | M00026854:57 | CH04MAL |
| 1185 | 10947 | RTA22200237F.l.16.1.P.Seq | F | M00022813:18 | CH03MAH |
| 1186 | 452856 | RTA22200007F.d.13.1.P.Seq | F | M00056169:66 | CH15CON |
| 1187 | 558767 | RTA22200015F.m.17.1.P.Seq | F | M00057127:77 | CH16COP |
| 1188 | 15035 | RTA22200008F.e.22.1.P.Seq | F | M00056438:16 | CH15CON |
| 1189 | 556421 | RTA22200005F.h.23.1.P.Seq | F | M00055906:612 | CH15CON |
| 1190 | 7082 | RTA22200235F.o.24.2.P.Seq | F | M00022565:15 | CH03MAH |
| 1191 | 452523 | RTA22200013F.j.07.1.P.Seq | F | M00056868:59 | CH16COP |
| 1192 | 3242 | RTA22200230F.a.01.1.P.Seq | F | M00007092:63 | CH02COH |
| 1193 | 6660 | RTA22200222F.i.24.1.P.Seq | F | M00003986:712 | CH01COH |
| 1194 | 547 | RTA22200244F.j.02.1.P.Seq | F | M00027197:77 | CH04MAL |
| 1195 | 121213 | RTA22200011F.i.23.1.P.Seq | F | M00056599:411 | CH16COP |
| 1196 | 4378 | RTA22200226F.p.15.1.P.Seq | F | M00005830:410 | CH02COH |
| 1197 | 185554 | RTA22200244F.m.17.1.P.Seq | F | M00027217:73 | CH04MAL |
| 1198 | 185482 | RTA22200241F.d.04.1.P.Seq | F | M00026873:28 | CH04MAL |
| 1199 | 185715 | RTA22200240F.l.14.1.P.Seq | F | M00026805:24 | CH04MAL |
| 1200 | 66017 | RTA22200243F.d.10.1.P.Seq | F | M00027097:711 | CH04MAL |
| 1201 | 403111 | RTA22200007F.j.14.1.P.Seq | F | M00056226:612 | CH15CON |
| 1202 | 3224 | RTA22200222F.o.18.1.P.Seq | F | M00004296:711 | CH01COH |
| 1203 | 966 | RTA22200238F.k.11.1.P.Seq | F | M00022961:211 | CH03MAH |
| 1204 | 3639 | RTA22200235F.j.05.2.P.Seq | F | M00022509:26 | CH03MAH |
| 1205 | 5388 | RTA22200243F.k.17.1.P.Seq | F | M00027139:36 | CH04MAL |
| 1206 | 3299 | RTA22200238F.b.05.1.P.Seq | F | M00022872:25 | CH03MAH |
| 1207 | 23760 | RTA22200241F.n.13.1.P.Seq | F | M00026949:810 | CH04MAL |
| 1208 | 729384 | RTA22200012F.n.06.1.P.Seq | F | M00056765:512 | CH16COP |
| 1209 | 46559 | RTA22200016F.g.16.1.P.Seq | F | M00057215:22 | CH16COP |
| 1210 | 449750 | RTA22200022F.n.05.1.P.Seq | F | M00054980:32 | CH17COHLV |
| 1211 | 735936 | RTA22200011F.i.02.1.P.Seq | F | M00056593:55 | CH16COP |
| 1212 | 607430 | RTA22200005F.o.04.1.P.Seq | F | M00055971:57 | CH15CON |
| 1213 | 452856 | RTA22200007F.g.23.1.P.Seq | F | M00056205:41 | CH15CON |
| 1214 | 557903 | RTA22200016F.g.07.1.P.Seq | F | M00057211:67 | CH16COP |
| 1215 | 453112 | RTA22200001F.g.01.1.P.Seq | F | M00042700:43 | CH15CON |
| 1216 | 645900 | RTA22200006F.i.24.2.P.Seq | F | M00056067:48 | CH15CON |
| 1217 | 415114 | RTA22200002F.m.20.1.P.Seq | F | M00055542:31 | CH15CON |
| 1218 | 418763 | RTA22200004F.l.11.1.P.Seq | F | M00055811:18 | CH15CON |
| 1219 | 2245 | RTA22200230F.a.12.1.P.Seq | F | M00007097:24 | CH02COH |
| 1220 | 403668 | RTA22200012F.o.18.1.P.Seq | F | M00056777:33 | CH16COP |
| 1221 | 15427 | RTA22200020F.m.08.1.P.Seq | F | M00054677:42 | CH17COHLV |
| 1222 | 555714 | RTA22200020F.n.23.1.P.Seq | F | M00054691:55 | CH17COHLV |
| 1223 | 555830 | RTA22200022F.d.19.1.P.Seq | F | M00054899:67 | CH17COHLV |
| 1224 | 4620 | RTA22200231F.e.13.1.P.Seq | F | M00007951:15 | CH03MAH |
| 1225 | 171511 | RTA22200012F.p.21.1.P.Seq | F | M00056789:34 | CH16COP |
| 1226 | 451401 | RTA22200008F.h.08.1.P.Seq | F | M00056475:312 | CH15CON |
| 1227 | 447501 | RTA22200002F.e.01.1.P.Seq | F | M00055453:51 | CH15CON |
| 1228 | 460445 | RTA22200022F.p.12.1.P.Seq | F | M00055005:28 | CH17COHLV |
| 1229 | 375814 | RTA22200004F.k.20.1.P.Seq | F | M00055806:59 | CH15CON |
| 1230 | 449356 | RTA22200026F.d.19.1.P.Seq | F | M00055423:78 | CH17COHLV |
| 1231 | 468736 | RTA22200022F.i.10.1.P.Seq | F | M00054943:33 | CH17COHLV |
| 1232 | 548858 | RTA22200023F.a.04.1.P.Seq | F | M00055011:54 | CH17COHLV |
| 1233 | 3693 | RTA22200240F.g.16.1.P.Seq | F | M00023393:32 | CH04MAL |
| 1234 | 642973 | RTA22200005F.k.19.1.P.Seq | F | M00055931:13 | CH15CON |
| 1235 | 561180 | RTA22200012F.n.04.1.P.Seq | F | M00056765:110 | CH16COP |
| 1236 | 453708 | RTA22200020F.p.07.1.P.Seq | F | M00054707:28 | CH17COHLV |
| 1237 | 645305 | RTA22200001F.p.17.1.P.Seq | F | M00054917:69 | CH15CON |
| 1238 | 463487 | RTA22200007F.e.12.1.P.Seq | F | M00056184:48 | CH15CON |
| 1239 | 11131 | RTA22200230F.b.14.1.P.Seq | F | M00007105:312 | CH02COH |
| 1240 | 561807 | RTA22200020F.k.18.1.P.Seq | F | M00054660:65 | CH17COHLV |
| 1241 | 452800 | RTA22200023F.n.03.1.P.Seq | F | M00055104:212 | CH17COHLV |
| 1242 | 372960 | RTA22200012F.p.07.1.P.Seq | F | M00056782:26 | CH16COP |
| 1243 | 449317 | RTA22200009F.k.10.2.P.Seq | F | M00042835:31 | CH16COP |
| 1244 | 730759 | RTA22200011F.n.19.1.P.Seq | F | M00056643:76 | CH16COP |
| 1245 | 9113 | RTA22200226F.i.12.1.P.Seq | F | M00005704:410 | CH02COH |
| 1246 | 630259 | RTA22200004F.k.14.1.P.Seq | F | M00055805:410 | CH15CON |
| 1247 | 3516 | RTA22200226F.o.20.1.P.Seq | F | M00005819:211 | CH02COH |
| 1248 | 447494 | RTA22200004F.j.14.1.P.Seq | F | M00055802:72 | CH15CON |
| 1249 | 554500 | RTA22200019F.n.10.1.P.Seq | F | M00054547:59 | CH17COHLV |
| 1250 | 639662 | RTA22200001F.p.19.1.P.Seq | F | M00054917:412 | CH15CON |
| 1251 | 421 | RTA22200009F.o.23.1.P.Seq | F | M00042869:56 | CH16COP |
| 1252 | 736014 | RTA22200016F.o.19.1.P.Seq | F | M00057277:39 | CH16COP |
| 1253 | 643061 | RTA22200006F.m.24.2.P.Seq | F | M00056099:811 | CH15CON |
| 1254 | 9113 | RTA22200229F.m.02.1.P.Seq | F | M00007035:56 | CH02COH |
| 1255 | 650856 | RTA22200007F.i.19.2.P.Seq | F | M00056221:55 | CH15CON |
| 1256 | 476223 | RTA22200009F.g.09.1.P.Seq | F | M00042792:64 | CH16COP |
| 1257 | 737088 | RTA22200011F.f.01.1.P.Seq | F | M00056564:59 | CH16COP |
| 1258 | 449512 | RTA22200022F.P.03.1.P.Seq | F | M00055000:64 | CH17COHLV |
| 1259 | 449457 | RTA22200023F.m.21.1.P.Seq | F | M00055100:48 | CH17COHLV |
| 1260 | 521901 | RTA22200022F.l.07.1.P.Seq | F | M00054964:811 | CH17COHLV |
| 1261 | 175799 | RTA22200001F.f.12.1.P.Seq | F | M00042695:85 | CH15CON |
| 1262 | 550108 | RTA22200012F.p.01.1.P.Seq | F | M00056779:810 | CH15CON |
| 1263 | 203605 | RTA22200003F.e.03.1.P.Seq | F | M00055618:16 | CH16COP |
| 1264 | 450429 | RTA22200013F.b.10.1.P.Seq | F | M00056805:29 | CH16COP |
| 1265 | 2478 | RTA22200238F.j.18.1.P.Seq | F | M00022956:29 | CH03MAH |
| 1266 | 644099 | RTA22200004F.b.06.1.P.Seq | F | M00055743:312 | CH15CON |
| 1267 | 552614 | RTA22200008F.e.13.1.P.Seq | F | M00056344:73 | CH15CON |
| 1268 | 452523 | RTA22200007F.g.15.1.P.Seq | F | M00056203:810 | CH15CON |
| 1269 | 446789 | RTA22200004F.l.01.1.P.Seq | F | M00055807:710 | CH15CON |
| 1270 | 515631 | RTA22200010F.c.15.1.P.Seq | F | M00056369:412 | CH16COP |
| 1271 | 452523 | RTA22200009F.h.13.1.P.Seq | F | M00042805:88 | CH16COP |
| 1272 | 640116 | RTA22200007F.l.23.2.P.Seq | F | M00056250:61 | CH15CON |
| 1273 | 9113 | RTA22200230F.a.14.1.P.Seq | F | M00007097:47 | CH02COH |
| 1274 | 562221 | RTA22200006F.b.03.2.P.Seq | F | M00056001:59 | CH15CON |
| 1275 | 455972 | RTA22200012F.i.18.1.P.Seq | F | M00056729:44 | CH16COP |
| 1276 | 449137 | RTA22200009F.e.12.1.P.Seq | F | M00042771:13 | CH16COP |
| 1277 | 5078 | RTA22200013F.p.15.1.P.Seq | F | M00056914:29 | CH16COP |
| 1278 | 5078 | RTA22200013F.g.09.1.P.Seq | F | M00056844:57 | CH16COP |
| 1279 | 4016 | RTA22200228F.d.20.1.P.Seq | F | M00006807:712 | CH02COH |
| 1280 | 403111 | RTA22200005F.m.11.1.P.Seq | F | M00055946:77 | CH15CON |
| 1281 | 562292 | RTA22200023F.g.07.1.P.Seq | F | M00055053:23 | CH17COHLV |
| 1282 | 403111 | RTA22200007F.j.14.2.P.Seq | F | M00056226:612 | CH15CON |
| 1283 | 403111 | RTA22200007F.m.22.1.P.Seq | F | M00056262:28 | CH15CON |
| 1284 | 500959 | RTA22200006F.i.23.2.P.Seq | F | M00056066:87 | CH15CON |
| 1285 | 763 | RTA22200231F.g.24.1.P.Seq | F | M00007965:33 | CH03MAH |
| 1286 | 763 | RTA22200231F.h.01.1.P.Seq | F | M00007965:33 | CH03MAH |
| 1287 | 500959 | RTA22200008F.f.19.1.P.Seq | F | M00056456:19 | CH15CON |
| 1288 | 452071 | RTA22200001F.g.03.1.P.Seq | F | M00042700:85 | CH15CON |
| 1289 | 468672 | RTA22200026F.e.16.1.P.Seq | F | M00055472:62 | CH17COHLV |
| 1290 | 455492 | RTA22200001F.j.08.1.P.Seq | F | M00042738:410 | CH15CON |
| 1291 | 639667 | RTA22200015F.f.11.1.P.Seq | F | M00057079:59 | CH16COP |
| 1292 | 549829 | RTA22200024F.e.11.1.P.Seq | F | M00055181:51 | CH17COHLV |
| 1293 | 553158 | RTA22200021F.f.02.3.P.Seq | F | M00054752:17 | CH17COHLV |
| 1294 | 561485 | RTA22200026F.d.14.1.P.Seq | F | M00055421:311 | CH17COHLV |
| 1295 | 639352 | RTA22200002F.l.04.1.P.Seq | F | M00055528:66 | CH15CON |
| 1296 | 451401 | RTA22200018F.h.16.1.P.Seq | F | M00043317:64 | CH17COHLV |
| 1297 | 643103 | RTA22200001F.l.19.1.P.Seq | F | M00042893:38 | CH15CON |
| 1298 | 468736 | RTA22200001F.j.23.1.P.Seq | F | M00042746:62 | CH15CON |
| 1299 | 218416 | RTA22200004F.b.09.1.P.Seq | F | M00055744:38 | CH15CON |
| 1300 | 447501 | RTA22200002F.d.24.1.P.Seq | F | M00055453:51 | CH15CON |
| 1301 | 558371 | RTA22200024F.m.15.1.P.Seq | F | M00055242:44 | CH17COHLV |
| 1302 | 561794 | RTA22200015F.f.14.1.P.Seq | F | M00057080:32 | CH16C0P |
| 1303 | 645065 | RTA22200004F.b.15.1.P.Seq | F | M00055744:78 | CH15CON |
| 1304 | 451269 | RTA22200001F.b.05.1.P.Seq | F | M00042534:27 | CH15CON |
| 1305 | 401553 | RTA22200004F.e.16.1.P.Seq | F | M00055771:67 | CH15CON |
| 1306 | 555276 | RTA22200022F.n.12.1.P.Seq | F | M00054984:212 | CH17COHLV |
| 1307 | 551617 | RTA22200021F.f.21.3.P.Seq | F | M00054762:67 | CH17COHLV |
| 1308 | 463480 | RTA22200001F.i.08.1.P.Seq | F | M00042727:812 | CH15CON |
| 1309 | 549178 | RTA22200022F.n.07.1.P.Seq | F | M00054981:511 | CH17COHLV |
| 1310 | 374450 | RTA22200003F.d.02.1.P.Seq | F | M00055601:49 | CH15CON |
| 1311 | 562835 | RTA22200009F.o.07.1.P.Seq | F | M00042864:55 | CH16COP |
| 1312 | 730555 | RTA22200014F.j.23.2.P.Seq | F | M00056997:89 | CH16COP |
| 1313 | 732978 | RTA22200015F.f.09.1.P.Seq | F | M00057078:312 | CH16COP |
| 1314 | 1609 | RTA22200001F.k.16.1.P.Seq | F | M00042883:612 | CH15CON |
| 1315 | 18591 | RTA22200015F.c.09.1.P.Seq | F | M00057058:69 | CH16COP |
| 1316 | 553158 | RTA22200021F.f.12.3.P.Seq | F | M00054759:28 | CH17COHLV |
| 1317 | 470602 | RTA22200024F.i.03.1.P.Seq | F | M00055206:84 | CH17COHLV |
| 1318 | 639662 | RTA22200003F.d.14.1.P.Seq | F | M00055609:612 | CH15CON |
| 1319 | 644721 | RTA22200004F.p.13.1.P.Seq | F | M00055839:69 | CH15CON |
| 1320 | 453202 | RTA22200025F.n.08.2.P.Seq | F | M00055390:48 | CH17COHLV |
| 1321 | 554655 | RTA222ObO15F.e.19.1.P.Seq | F | M00057073:15 | CH16COP |
| 1322 | 641988 | RTA22200002F.c.20.1.P.Seq | F | M00055446:26 | CH15CON |
| 1323 | 453112 | RTA22200001F.f.24.1.P.Seq | F | M00042700:43 | CH15CON |
| 1324 | 550694 | RTA22200020F.c.09.1.P.Seq | F | M00054583:65 | CH17COHLV |
| 1325 | 649106 | RTA22200004F.h.02.1.P.Seq | F | M00055788:13 | CH15CON |
| 1326 | 638973 | RTA22200002F.g.14.1.P.Seq | F | M00055494:39 | CH15CON |
| 1327 | 549911 | RTA22200024F.h.16.1.P.Seq | F | M00055203:82 | CH17COHLV |
| 1328 | 648774 | RTA22200013F.o.21.1.P.Seq | F | M00056909:511 | CH16COP |
| 1329 | 549911 | RTA22200024F.g.03.1.P.Seq | F | M00055194:35 | CH17COHLV |
| 1330 | 639662 | RTA22200003F.a.10.1.P.Seq | F | M00055572:212 | CH15CON |
| 1331 | 560455 | RTA22200024F.l.03.1.P.Seq | F | M00055231:410 | CH17COHLV |
| 1332 | 735805 | RTA22200016F.d.23.1.P.Seq | F | M00057191:13 | CH15COP |
| 1333 | 732712 | RTA22200014F.p.03.2.P.Seq | F | M00057029:16 | CH16COP |
| 1334 | 446663 | RTA22200026F.f.10.1.P.Seq | F | M00055479:72 | CH17COHLV |
| 1335 | 226324 | RTA22200024F.e.17.1.P.Seq | F | M00055182:37 | CH17COHLV |
| 1336 | 453016 | RTA22200013F.m.14.1.P.Seq | F | M00056893:86 | CH16COP |
| 1337 | 550998 | RTA22200016F.d.20.1.P.Seq | F | M00057189:75 | CH16COP |
| 1338 | 452414 | RTA22200008F.d.21.1.P.Seq | F | M00056331:41 | CH15CON |
| 1339 | 129535 | RTA22200003F.a.13.1.P.Seq | F | M00055572:63 | CH15CON |
| 1340 | 447089 | RTA22200001F.c.04.1.P.Seq | F | M00042543:82 | CH15CON |
| 1341 | 447850 | RTA22200021F.c.07.2.P.Seq | F | M00054732:53 | CH17COHLV |
| 1342 | 556216 | RTA22200021F.l.05.3.P.Seq | F | M00054823:87 | CH17COHLV |
| 1343 | 452523 | RTA22200003F.d.13.1.P.Seq | F | M00055609:73 | CH15CON |
| 1344 | 44424 | RTA22200015F.i.23.1.P.Seq | F | M00057103:89 | CH16COP |
| 1345 | 648872 | RTA22200004F.m.05.1.P.Seq | F | M00055817:48 | CH15CON |
| 1346 | 451636 | RTA22200018F.e.12.1.P.Seq | F | M00043300:811 | CH17COHLV |
| 1347 | 5078 | RTA22200024F.a.14.1.P.Seq | F | M00055145:67 | CH17COHLV |
| 1348 | 403111 | RTA22200002F.g.21.1.P.Seq | F | M00055495:52 | CH15CON |
| 1349 | 648959 | RTA22200002F.d.02.1.P.Seq | F | M00055448:48 | CH15CON |
| 1350 | 380291 | RTA22200001F.b.12.1.P.Seq | F | M00042537:85 | CH15CON |
| 1351 | 380291 | RTA22200001F.c.09.1.P.Seq | F | M00042547:12 | CH15CON |
| 1352 | 230995 | RTA22200020F.e.24.1.P.Seq | F | M00054604:49 | CH17COHLV |
| 1353 | 562221 | RTA22200025F.a.22.1.P.Seq | F | M00055273:35 | CH17COHLV |
| 1354 | 450959 | RTA22200018F.f.14.1.P.Seq | F | M00043306:27 | CH17COHLV |
| 1355 | 452833 | RTA22200018F.d.24.1.P.Seq | F | M00042520:69 | CH17COHLV |
| 1356 | 550195 | RTA22200020F.e.19.1.P.Seq | F | M00054602:34 | CH17COHLV |
| 1357 | 448927 | RTA22200018F.l.10.1.P.Seq | F | M00043349:38 | CH17COHLV |
| 1358 | 551514 | RTA22200020F.h.08.1.P.Seq | F | M00054629:59 | CH17COHLV |
| 1359 | 549829 | RTA22200020F.f.14.1.P.Seq | F | M00054609:86 | CH17COHLV |
| 1360 | 551514 | RTA22200025F.f.12.1.P.Seq | F | M00055327:88 | CH17COHLV |
| 1361 | 561485 | RTA22200025F.i.07.1.P.Seq | F | M00055358:31 | CH17COHLV |
| 1362 | 453846 | RTA22200025F.k.20.1.P.Seq | F | M00055376:21 | CH17COHLV |
| 1363 | 69863 | RTA22200249F.j.23.1.P.Seq | F | M00027699:42 | CH17COHLV |
| 1364 | 727181 | RTA22200011F.d.23.1.P.Seq | F | M00056555:69 | CH16COP |
| 1365 | 454050 | RTA22200011F.c.06.1.P.Seq | F | M00056541:18 | CH16COP |
| 1366 | 725994 | RTA22200011F.b.07.1.P.Seq | F | M00056534:411 | CH16COP |
| 1367 | 1495 | RTA22200234F.j.11.1.P.Seq | F | M00022273:19 | CH03MAH |
| 1368 | 5665 | RTA2220b233F.n.01.1.P.Seq | F | M00021654:14 | CH03MAH |
| 1369 | 5665 | RTA22200233F.m.24.1.P.Seq | F | M00021654:14 | CH03MAH |
| 1370 | 646146 | RTA22200010F.i.03.1.P.Seq | F | M00056421:612 | CH16COP |
| 1371 | 8371 | RTA22200224F.e.18.1.P.Seq | F | M00005000:88 | CH02COH |
| 1372 | 73812 | RTA22200250F.e.14.1.P.Seq | F | M00027817:211 | CH04MAL |
| 1373 | 4242 | RTA22200233F.k.20.1.P.Seq | F | M00021620:610 | CH03MAH |
| 1374 | 5482 | RTA22200225F.a.01.1.P.Seq | F | M00005411:37 | CH02COH |
| 1375 | 5474 | RTA22200224F.p.13.1.P.Seq | F | M00005407:512 | CH02COH |
| 1376 | 5448 | RTA22200225F.a.13.1.P.Seq | F | M00005413:63 | CH02COH |
| 1377 | 7607 | RTA22200225F.c.10.1.P.Seq | F | M00005438:16 | CH02COH |
| 1378 | 555928 | RTA22200010F.o.23.1.P.Seq | F | M00056514:71 | CH16COP |
| 1379 | 4046 | RTA22200224F.j.04.1.P.Seq | F | M00005359:16 | CH02COH |
| 1380 | 554080 | RTA22200019F.f.02.1.P.Seq | F | M00043508:18 | CH17COHLV |
| 1381 | 451092 | RTA22200018F.p.13.1.P.Seq | F | M00043377:33 | CH17COHLV |
| 1382 | 551380 | RTA22200018F.p.22.1.P.Seq | F | M00043381:510 | CH17COHLV |
| 1383 | 546642 | RTA22200014F.o.20.1.P.Seq | F | M00057029:312 | CH16COP |
| 1384 | 1764 | RTA22200228F.c.06.1.P.Seq | F | M00006789:111 | CH02COH |
| 1385 | 650773 | RTA22200005F.c.05.1.P.Seq | F | M00055864:511 | CH15CON |
| 1386 | 644205 | RTA22200005F.d.20.1.P.Seq | F | M00055874:26 | CH15CON |
| 1387 | 185718 | RTA22200242F.m.05.1.P.Seq | F | M00027051:17 | CH04MAL |
| 1388 | 5538 | RTA22200227F.k.23.1.P.Seq | F | M00006712:62 | CH02COH |
| 1389 | 7546 | RTA22200222F.e.06.1.P.Seq | F | M00001625:28 | CH01COH |
| 1390 | 727789 | RTA22200014F.b.21.1.P.Seq | F | M00056939:68 | CH16C0P |
| 1391 | 3837 | RTA22200232F.m.13.1.P.Seq | F | M00022137:74 | CH03MAH |
| 1392 | 380477 | RTA22200007F.d.03.1.P.Seq | F | M00056162:46 | CH15CON |
| 1393 | 3299 | RTA22200238F.a.22.1.P.Seq | F | M00022861:210 | CH03MAH |
| 1394 | 448853 | RTA22200009F.b.12.2.P.Seq | F | M00042463:69 | CH16COP |
| 1395 | 736701 | RTA22200012F.h.21.1.P.Seq | F | M00056723:410 | CH16COP |
| 1396 | 735296 | RTA22200013F.k.05.1.P.Seq | F | M00056873:56 | CH16COP |
| 1397 | 13666 | RTA22200241F.f.02.1.P.Seq | F | M00026893:11 | CH04MAL |
| 1398 | 732712 | RTA22200013F.l.11.1.P.Seq | F | M00056883:17 | CH16COP |
| 1399 | 3765 | RTA22200227F.o.19.1.P.Seq | F | M00006755:14 | CH02COH |
| 1400 | 185596 | RTA22200243F.j.05.1.P.Seq | F | M00027134:72 | CH04MAL |
| 1401 | 1943 | RTA22200233F.e.19.1.P.Seq | F | M00008065:25 | CH03MAH |
| 1402 | 448193 | RTA22200009F.d.18.2.P.Seq | F | M00042764:24 | CH16COP |
| 1403 | 1793 | RTA22200235F.d.08.1.P.Seq | F | M00022444:311 | CH03MAH |
| 1404 | 2475 | RTA22200243F.c.22.1.P.Seq | F | M00027096:77 | CH04MAL |
| 1405 | 730866 | RTA22200012F.c.23.1.P.Seq | F | M00056690:69 | CH16COP |
| 1406 | 730389 | RTA22200013F.k.10.1.P.Seq | F | M00056874:86 | CH16COP |
| 1407 | 641884 | RTA22200003F.m.17.1.P.Seq | F | M00055705:77 | CH15CON |
| 1408 | 463487 | RTA22200014F.f.09.2.P.Seq | F | M00056961:28 | CH16COP |
| 1409 | 5156 | RTA22200225F.m.12.1.P.Seq | F | M00005516:86 | CH02COH |
| 1410 | 728408 | RTA22200012F.h.05.1.P.Seq | F | M00056718:72 | CH16COP |
| 1411 | 73812 | RTA22200242F.m.20.1.P.Seq | F | M00027054:23 | CH04MAL |
| 1412 | 1662 | RTA22200231F.n.18.1.P.Seq | F | M00007994:15 | CH03MAH |
| 1413 | 736556 | RTA22200012F.c.09.1.P.Seq | F | M00056683:29 | CH16COP |
| 1414 | 5240 | RTA22200230F.i.16.1.P.Seq | F | M00007172:33 | CH02COH |
| 1415 | 6184 | RTA22200230F.a.11.1.P.Seq | F | M00007096:82 | CH02COH |
| 1416 | 446404 | RTA22200007F.m.11.1.P.Seq | F | M00056253:86 | CH15CON |
| 1417 | 646825 | RTA22200005F.m.17.1.P.Seq | F | M00055951:32 | CH15CON |
| 1418 | 734929 | RTA22200011F.i.10.1.P.Seq | F | M00056592:47 | CH16COP |
| 1419 | 648851 | RTA22200007F.e.21.1.P.Seq | F | M00056185:13 | CH15CON |
| 1420 | 640135 | RTA22200014F.o.14.2.P.Seq | F | M00057027:76 | CH16COP |
| 1421 | 7443 | RTA22200234F.p.21.1.P.Seq | F | M00022411:712 | CH03MAH |
| 1422 | 454050 | RTA22200007F.h.03.1.P.Seq | F | M00056206:56 | CH15CON |
| 1423 | 3765 | RTA22200226F.l.11.1.P.Seq | F | M00005766:610 | CH02COH |
| 1424 | 648320 | RTA22200003F.p.03.1.P.Seq | F | M00055726:710 | CH15CON |
| 1425 | 451269 | RTA22200005F.g.17.1.P.Seq | F | M00055889:812 | CH15CON |
| 1426 | 535208 | RTA22200005F.h.10.1.P.Seq | F | M00055896:611 | CH15CON |
| 1427 | 728115 | RTA22200012F.i.04.1.P.Seq | F | M00056724:511 | CH16COP |
| 1428 | 5240 | RTA22200228F.b.08.1.P.Seq | F | M00006783:67 | CH02COH |
| 1429 | 909 | RTA22200233F.d.12.1.P.Seq | F | M00008043:211 | CH03MAH |
| 1430 | 447697 | RTA22200001F.m.18.1.P.Seq | F | M00042905:611 | CH15CON |
| 1431 | 447737 | RTA22200005F.k.16.1.P.Seq | F | M00055930:28 | CH15CON |
| 1432 | 651100 | RTA22200010F.d.03.1.P.Seq | F | M00056371:612 | CH16COP |
| 1433 | 735477 | RTA22200010F.d.20.1.P.Seq | F | M00056383:310 | CH16COP |
| 1434 | 3774 | RTA22200230F.c.04.1.P.Seq | F | M00007110:63 | CH02COH |
| 1435 | 646146 | RTA22200006F.a.09.2.P.Seq | F | M00055997:711 | CH15CON |
| 1436 | 643931 | RTA22200005F.j.20.1.P.Seq | F | M00055921:211 | CH15CON |
| 1437 | 463487 | RTA22200013F.h.14.1.P.Seq | F | M00056857:39 | CH16COP |
| 1438 | 650097 | RTA22200016F.h.08.1.P.Seq | F | M00057218:31 | CH16COP |
| 1439 | 554469 | RTA22200012F.o.20.1.P.Seq | F | M00056777:22 | CH16COP |
| 1440 | 476223 | RTA22200010F.a.21.1.P.Seq | F | M00056356:64 | CH16COP |
| 1441 | 8738 | RTA22200231F.c.10.1.P.Seq | F | M00007939:13 | CH03MAH |
| 1442 | 403978 | RTA22200008F.e.10.1.P.Seq | F | M00056342:73 | CH15CON |
| 1443 | 185539 | RTA22200240F.f.19.1.P.Seq | F | M00023377:39 | CH04MAL |
| 1444 | 451811 | RTA22200001F.p.04.1.P.Seq | F | M00054913:73 | CH15CON |
| 1445 | 140731 | RTA22200015F.n.18.1.P.Seq | F | M00057133:61 | CH16COP |
| 1446 | 734582 | RTA22200013F.c.12.1.P.Seq | F | M00056816:110 | CH16COP |
| 1447 | 463487 | RTA22200001F.e.05.1.P.Seq | F | M00042565:83 | CH15CON |
| 1448 | 558719 | RTA22200004F.d.17.1.P.Seq | F | M00055766:83 | CH15CON |
| 1449 | 21669 | RTA22200023F.j.14.1.P.Seq | F | M00055073:812 | CH17COHLV |
| 1450 | 470462 | RTA22200006F.b.13.2.P.Seq | F | M0005600:55 | CH15CON |
| 1451 | 3316 | RTA22200022F.i.09.1.P.Seq | F | M00054943:34 | CH17COHLV |
| 1452 | 553728 | RTA22200021F.e.07.3.P.Seq | F | M00054747:61 | CH17COHLV |
| 1453 | 736014 | RTA22200016F.p.01.1.P.Seq | F | M00057279:72 | CH16COP |
| 1454 | 237288 | RTA22200002F.m.12.1.P.Seq | F | M00055538:811 | CH15CON |
| 1455 | 11141 | RTA22200226F.m.20.1.P.Seq | F | M00005782:210 | CH02COH |
| 1456 | 556421 | RTA22200022F.k.11.1.P.Seq | F | M00054957:22 | CH17COHLV |
| 1457 | 549435 | RTA22200006F.h.16.1.P.Seq | F | M00056055:43 | CH15CON |
| 1458 | 448927 | RTA22200009F.g.08.1.P.Seq | F | M00042792:710 | CH16COP |
| 1459 | 379105 | RTA22200023F.o.09.1.P.Seq | F | M0005512:37 | CH17COHLV |
| 1460 | 552614 | RTA22200020F.m.20.1.P.Seq | F | M00054680:56 | CH17COHLV |
| 1461 | 470602 | RTA22200004F.l.04.1.P.Seq | F | M00055807:34 | CH15CON |
| 1462 | 557039 | RTA22200022F.o.03.1.P.Seq | F | M00054988:72 | CH17COHLV |
| 1463 | 549864 | RTA22200022F.k.06.1.P.Seq | F | M00054954:33 | CH17COHLV |
| 1464 | 449836 | RTA22200017F.a.23.1.P.Seq | F | M00057301:812 | CH16COP |
| 1465 | 554812 | RTA22200023F.m.06.1.P.Seq | F | M00055094:89 | CH17COHLV |
| 1466 | 3316 | RTA22200021F.l.17.3.P.Seq | F | M00054827:81 | CH17COHLV |
| 1467 | 649852 | RTA22200003F.l.09.1.P.Seq | F | M00055689:712 | CH15CON |
| 1468 | 453592 | RTA22200001F.g.17.1.P.Seq | F | M00042705:42 | CH15CON |
| 1469 | 455096 | RTA22200026F.g.02.1.P.Seq | F | M00055482:11 | CH17COHLV |
| 1470 | 446199 | RTA22200009F.n.08.1.P.Seq | F | M00042855:29 | CH16COP |
| 1471 | 558427 | RTA22200024F.m.11.1.P.Seq | F | M00055242:56 | CH17COHLV |
| 1472 | 450255 | RTA22200021F.j.13.3.P.Seq | F | M00054810:82 | CH17COHLV |
| 1473 | 452026 | RTA22200003F.l.10.1.P.Seq | F | M00055689:62 | CH15CON |
| 1474 | 374971 | RTA22200024F.p.11.1.P.Seq | F | M00055260:612 | CH17COHLV |
| 1475 | 446404 | RTA22200003F.l.04.1.P.Seq | F | M00055686:511 | CH15CON |
| 1476 | 549591 | RTA22200025F.p.19.2.P.Seq | F | M00055404:37 | CH17COHLV |
| 1477 | 640135 | RTA22200014F.o.14.3.P.Seq | F | M00057027:76 | CH16COP |
| 1478 | 646248 | RTA22200016F.k.06.1.P.Seq | F | M00057239:78 | CH16COP |
| 1479 | 639705 | RTA22200004F.e.05.1.P.Seq | F | M00055770:71 | CH15CON |
| 1480 | 483084 | RTA22200004F.m.03.1.P.Seq | F | M00055817:61 | CH15CON |
| 1481 | 464029 | RTA22200026F.b.04.1.P.Seq | F | M00055408:63 | CH17COHLV |
| 1482 | 428005 | RTA22200021F.c.03.2.P.Seq | F | M00054731:312 | CH17COHLV |
| 1483 | 91178 | RTA22200024F.o.02.1.P.Seq | F | M00055252:32 | CH17COHLV |
| 1484 | 550571 | RTA22200024F.k.21.1.P.Seq | F | M00055227:57 | CH17COHLV |
| 1485 | 735028 | RTA22200015F.e.10.1.P.Seq | F | M00057070:28 | CH16COP |
| 1486 | 559409 | RTA22200021F.m.17.2.P.Seq | F | M00054839:66 | CH17COHLV |
| 1487 | 551172 | RTA22200021F.m.09.2.P.Seq | F | M00054836:25 | CH17COHLV |
| 1488 | 648872 | RTA22200002F.g.23.1.P.Seq | F | M00055496:69 | CH15CON |
| 1489 | 446404 | RTA22200001F.l.13.1.P.Seq | F | M00042887:47 | CH15CON |
| 1490 | 734063 | RTA22200016F.j.24.1.P.Seq | F | M00057237:211 | CH16COP |
| 1491 | 467991 | RTA22200008F.c.22.1.P.Seq | F | M00056320:82 | CH15CON |
| 1492 | 454050 | RTA22200008F.d.06.1.P.Seq | F | M00056323.312 | CH16COP |
| 1493 | 734646 | RTA22200015F.j.06.1.P.Seq | F | M00057104:68 | CH16COP |
| 1494 | 450192 | RTA22200018F.n.06.1.P.Seq | F | M00043361:45 | CH17COHLV |
| 1495 | 403978 | RTA22200018F.f.01.1.P.Seq | F | M00043304:35 | CH17COHLV |
| 1496 | 734209 | RTA22200016F.c.16.1.P.Seq | F | M00057174:36 | CH16COP |
| 1497 | 14805 | RTA22200021F.o.12.2.P.Seq | F | M00054856:12 | CH17COHLV |
| 1498 | 230995 | RTA22200020F.f.01.1.P.Seq | F | M00054604:49 | CH17COHLV |
| 1499 | 120049 | RTA22200020F.e.18.1.P.Seq | F | M00054601:58 | CH17COHLV |
| 1500 | 642142 | RTA22200004F.f.16.1.P.Seq | F | M00055780:27 | CH15CON |
| 1501 | 403978 | RTA22200018F.e.24.1.P.Seq | F | M00043304:35 | CH17COHLV |
| 1502 | 386543 | RTA22200018F.g.02.1.P.Seq | F | M00043309:87 | CH17COHLV |
| 1503 | 379105 | RTA22200018F.a.14.1.P.Seq | F | M00042355:72 | CH17COHLV |
| 1504 | 450255 | RTA22200018F.c.16.1.P.Seq | F | M00042455:411 | CH17COHLV |
| 1505 | 730143 | RTA22200011F.a.03.1.P.Seq | F | M00056526:511 | CH16COP |
| 1506 | 734209 | RTA22200010F.m.02.1.P.Seq | F | M00056496:11 | CH16COP |
| 1507 | 401553 | RTA22200010F.m.16.1.P.Seq | F | M00056501:87 | CH16COP |
| 1508 | 72979 | RTA22200019F.a.15.1.P.Seq | F | M00043388:39 | CH17COHLV |
| 1509 | 726307 | RTA22200010F.o.16.1.P.Seq | F | M00056512:312 | CH16COP |
| 1510 | 230995 | RTA22200019F.b.14.1.P.Seq | F | M00043397:29 | CH17COHLV |
| 1511 | 35241 | RTA22200227F.f.19.1.P.Seq | F | M00006650:13 | CH02COH |
| 1512 | 8112 | RTA22200237F.m.13.1.P.Seq | F | M00022823:43 | CH03MAH |
| 1513 | 5240 | RTA22200237F.m.05.1.P.Seq | F | M00022820:36 | CH03MAH |
| 1514 | 447326 | RTA22200005F.c.22.1.P.Seq | F | M00055868:69 | CH15CON |
| 1515 | 2676 | RTA22200227F.k.01.1.P.Seq | F | M00006695:88 | CH02COH |
| 1516 | 736701 | RTA22200014F.e.11.1.P.Seq | F | M00056955:79 | CH16COP |
| 1517 | 736701 | RTA22200014F.e.11.2.P.Seq | F | M00056955:79 | CH16COP |
| 1518 | 8371 | RTA22200229F.a.07.1.P.Seq | F | M00006921:88 | CH02COH |
| 1519 | 8336 | RTA22200235F.f.24.1.P.Seq | F | M00022470:71 | CH03MAH |
| 1520 | 185542 | RTA22200248F.h.05.1.P.Seq | F | M00027564:43 | CH04MAL |
| 1521 | 448046 | RTA22200014F.d.13.1.P.Seq | F | M00056951:69 | CH16COP |
| 1522 | 185422 | RTA22200242F.j.15.1.P.Seq | F | M00027034:411 | CH04MAL |
| 1523 | 650448 | RTA22200005F.c.17.1.P.Seq | F | M00055868:66 | CH15CON |
| 1524 | 5753 | RTA22200227F.n.02.1.P.Seq | F | M00006737:111 | CH02COH |
| 1525 | 8001 | RTA22200222F.a.01.1.P.Seq | F | M00001340:51 | CH01COH |
| 1526 | 1644 | RTA22200240F.j.17.1.P.Seq | F | M00023430:410 | CH04MAL |
| 1527 | 4453 | RTA22200237F.o.18.1.P.Seq | F | M00022836:73 | CH03MAH |
| 1528 | 454152 | RTA22200020F.j.08.1.P.Seq | F | M00054646:21 | CH17COHLV |
| 1529 | 9913 | RTA22200231F.m.19.1.P.Seq | F | M00007991:71 | CH03MAH |
| 1530 | 1350 | RTA22200227F.m.14.1.P.Seq | F | M00006731:51 | CH02COH |
| 1531 | 188 | RTA22200244F.i.18.1.P.Seq | F | M00027194:15 | CH04MAL |
| 1532 | 4471 | RTA22200232F.g.09.1.P.Seq | F | M00022025:42 | CH03MAH |
| 1533 | 2622 | RTA22200248F.i.16.1.P.Seq | F | M00027573:69 | CH04MAL |
| 1534 | 185465 | RTA22200248F.j.08.1.P.Seq | F | M00027578:54 | CH04MAL |
| 1535 | 19205 | RTA22200244F.b.14.1.P.Seq | F | M00027171:27 | CH04MAL |
| 1536 | 185635 | RTA22200242F.l.11.1.P.Seq | F | M00027046:55 | CH04MAL |
| 1537 | 5289 | RTA22200235F.o.06.2.P.Seq | F | M00022559:49 | CH03MAH |
| 1538 | 779 | RTA22200238F.f.01.1.P.Seq | F | M00022901:511 | CH03MAH |
| 1539 | 779 | RTA22200238F.e.24.1.P.Seq | F | M00022901:511 | CH03MAH |
| 1540 | 5289 | RTA22200235F.m.20.2.P.Seq | F | M00022550:24 | CH03MAH |
| 1541 | 456808 | RTA22200013F.d.22.1.P.Seq | F | M00056823:17 | CH16COP |
| 1542 | 646620 | RTA22200007F.n.14.1.P.Seq | F | M00056267:22 | CH15CON |
| 1543 | 546642 | RTA22200013F.d.21.1.P.Seq | F | M00056823:25 | CH16COP |
| 1544 | 649732 | RTA22200003F.n.10.1.P.Seq | F | M00055716:24 | CH15CON |
| 1545 | 5240 | RTA22200231F.f.05.1.P.Seq | F | M00007953:89 | CH03MAH |
| 1546 | 448046 | RTA22200009F.c.06.2.P.Seq | F | M00042511:14 | CH16COP |
| 1547 | 650476 | RTA22200008F.f.07.1.P.Seq | F | M00056447:14 | CH15CON |
| 1548 | 379341 | RTA22200016F.n.21.1.P.Seq | F | M00057272:84 | CH16COP |
| 1549 | 401849 | RTA22200003F.p.02.1.P.Seq | F | M00055726:412 | CH15CON |
| 1550 | 11452 | RTA22200227F.f.18.1.P.Seq | F | M00006649:211 | CH02COH |
| 1551 | 185417 | RTA22200242F.b.12.1.P.Seq | F | M00026977:59 | CH04MAL |
| 1552 | 4471 | RTA22200232F.c.20.1.P.Seq | F | M00021925:810 | CH03MAH |
| 1553 | 2557 | RTA22200228F.e.11.1.P.Seq | F | M00006810:411 | CH02COH |
| 1554 | 3656 | RTA22200227F.f.01.1.P.Seq | F | M00006641:83 | CH02COH |
| 1555 | 2327 | RTA22200241F.i.20.1.P.Seq | F | M00026917:83 | CH04MAL |
| 1556 | 449026 | RTA22200009F.o.17.1.P.Seq | F | M00042867:81 | CH16COP |
| 1557 | 730227 | RTA22200013F.n.03.1.P.Seq | F | M00056896:610 | CH16COP |
| 1558 | 650864 | RTA22200006F.e.08.2.P.Seq | F | M00056028:63 | CH15CON |
| 1559 | 530774 | RTA22200004F.j.19.1.P.Seq | F | M00055803:111 | CH15CON |
| 1560 | 395341 | RTA22200011F.g.06.1.P.Seq | F | M00056580:610 | CH16COP |
| 1561 | 557906 | RTA22200004F.a.07.1.P.Seq | F | M00055735:75 | CH15CON |
| 1562 | 452531 | RTA22200009F.l.08.2.P.Seq | F | M00042842:58 | CH16COP |
| 1563 | 559057 | RTA22200021F.e.09.3.P.Seq | F | M00054747:36 | CH17COHLV |
| 1564 | 448046 | RTA22200014F.d.13.2.P.Seq | F | M00056951:69 | CH16COP |
| 1565 | 553547 | RTA22200022F.g.22.1.P.Seq | F | M00054935:51 | CH17COHLV |
| 1566 | 4636 | RTA22200231F.e.20.1.P.Seq | F | M00007953:11 | CH03MAH |
| 1567 | 455601 | RTA22200006F.f.06.2.P.Seq | F | M00056037:22 | CH15CON |
| 1568 | 172013 | RTA22200002F.c.05.1.P.Seq | F | M00055441:42 | CH15CON |
| 1569 | 552597 | RTA22200013F.a.02.1.P.Seq | F | M00056791:612 | CH16COP |
| 1570 | 446531 | RTA22200001F.c.11.1.P.Seq | F | M00042547:411 | CH15CON |
| 1571 | 639352 | RTA22200008F.a.09.1.P.Seq | F | M00056293:79 | CH15CON |
| 1572 | 642604 | RTA22200004F.e.12.1.P.Seq | F | M00055771:65 | CH15CON |
| 1573 | 558534 | RTA22200008F.c.04.1.P.Seq | F | M00056310:76 | CH15CON |
| 1574 | 556421 | RTA22200026F.b.02.1.P.Seq | F | M00055408:59 | CH17COHLV |
| 1575 | 735477 | RTA22200016F.k.10.1.P.Seq | F | M00057242:67 | CH16COP |
| 1576 | 640703 | RTA22200014F.o.06.2.P.Seq | F | M00057024:52 | CH16COP |
| 1577 | 643878 | RTA22200015F.j.14.1.P.Seq | F | M00057106:13 | CH16COP |
| 1578 | 557797 | RTA22200004F.e.07.1.P.Seq | F | M00055771:111 | CH15CON |
| 1579 | 557200 | RTA22200021F.b.08.2.P.Seq | F | M00054727:510 | CH17COHLV |
| 1580 | 729531 | RTA22200015F.h.06.1.P.Seq | F | M00057091:512 | CH16COP |
| 1581 | 734554 | RTA22200014F.o.09.2.P.Seq | F | M00057024:88 | CH16COP |
| 1582 | 418008 | RTA22200020F.e.16.1.P.Seq | F | M00054601:810 | CH17COHLV |
| 1583 | 558614 | RTA22200024F.k.16.1.P.Seq | F | M00055227:89 | CH17COHLV |
| 1584 | 452245 | RTA22200025F.l.16.1.P.Seq | F | M00055381:59 | CH17COHLV |
| 1585 | 449891 | RTA22200019F.b.13.1.P.Seq | F | M00043397:22 | CH17COHLV |
| 1586 | 547916 | RTA22200011F.a.18.1.P.Seq | F | M00056529:612 | CH16COP |
| 1587 | 6162 | RTA22200233F.l.19.1.P.Seq | F | M00021628:211 | CH03MAH |
| 1588 | 6162 | RTA22200234F.f.14.1.P.Seq | F | M00022234:45 | CH03MAH |
| 1589 | 4809 | RTA22200224F.d.21.1.P.Seq | F | M00004868:412 | CH02COH |
| 1590 | 3926 | RTA22200242F.d.18.1.P.Seq | F | M00026993:86 | CH04MAL |
| 1591 | 185693 | RTA22200248F.d.20.1.P.Seq | F | M00027532:32 | CH04MAL |
| 1592 | 641683 | RTA22200007F.m.16.1.P.Seq | F | M00056256:811 | CH15CON |
| 1593 | 11351 | RTA22200226F.o.18.1.P.Seq | F | M00005818:29 | CH02COH |
| 1594 | 650864 | RTA22200008F.g.16.1.P.Seq | F | M00056467:57 | CH15CON |
| 1595 | 460445 | RTA22200001F.i.11.1.P.Seq | F | M00042728:57 | CH15CON |
| 1596 | 447669 | RTA22200011F.e.16.1.P.Seq | F | M00056561:48 | CH16COP |
| 1597 | 227936 | RTA22200016F.m.13.1.P.Seq | F | M00057259:810 | CH16COP |
| 1598 | 639459 | RTA22200002F.l.20.1.P.Seq | F | M00055532:78 | CH15CON |
| 1599 | 650195 | RTA22200004F.a.04.1.P.Seq | F | M00055734:85 | CH15CON |
| 1600 | 734793 | RTA22200016F.n.06.1.P.Seq | F | M00057268:510 | CH16COP |
| 1601 | 540787 | RTA22200002F.m.10.1.P.Seq | F | M00055536:56 | CH15CON |
| 1602 | 400654 | RTA22200003F.n.13.1.P.Seq | F | M00055718:65 | CH15CON |
| 1603 | 731467 | RTA22200016F.f.21.1.P.Seq | F | M00057208:36 | CH16COP |
| 1604 | 4045 | RTA22200232F.g.23.1.P.Seq | F | M00022052:18 | CH03MAH |
| 1605 | 447669 | RTA22200011F.l.23.1.P.Seq | F | M00056628:61 | CH16COP |
| 1606 | 11351 | RTA22200230F.c.20.1.P.Seq | F | M00007121:78 | CH02COH |
| 1607 | 648931 | RTA22200002F.l.16.1.P.Seq | F | M00055530:27 | CH15CON |
| 1608 | 726786 | RTA22200016F.e.08.1.P.Seq | F | M00057192:72 | CH16COP |
| 1609 | 4508 | RTA22200226F.o.02.1.P.Seq | F | M00005810:710 | CH02COH |
| 1610 | 415058 | RTA22200022F.h.07.1.P.Seq | F | M00054937:23 | CH17COHLV |
| 1611 | 450633 | RTA22200006F.l.11.2.P.Seq | F | M00056085:811 | CH15SCON |
| 1612 | 736955 | RTA22200014F.h.05.2.P.Seq | F | M00056973:28 | CH16COP |
| 1613 | 729851 | RTA22200013F.h.15.1.P.Seq | F | M00056858:23 | CH16COP |
| 1614 | 2512 | RTA22200235F.c.11.1.P.Seq | F | M00022430:410 | CH03MAH |
| 1615 | 452704 | RTA22200008F.f.21.1.P.Seq | F | M00056456:61 | CH15CON |
| 1616 | 4589 | RTA22200230F.c.15.1.P.Seq | F | M00007117:83 | CH02COH |
| 1617 | 4727 | RTA22200233F.e.16.1.P.Seq | F | M00008059:28 | CH03MAH |
| 1618 | 454380 | RTA22200014F.d.23.1.P.Seq | F | M00056953:16 | CH16COP |
| 1619 | 553912 | RTA22200021F.j.04.3.P.Seq | F | M00054808:47 | CH17COHLV |
| 1620 | 450004 | RTA22200012F.k.08.1.P.Seq | F | M00058741:36 | CH16COP |
| 1621 | 448193 | RTA22200012F.g.20.1.P.Seq | F | M00056715:34 | CH16COP |
| 1622 | 549591 | RTA22200020F.i.03.1.P.Seq | F | M00054636:62 | CH17COHLV |
| 1623 | 448511 | RTA22200023F.b.05.1.P.Seq | F | M00055021:411 | CH17COHLV |
| 1624 | 335 | RTA22200012F.l.18.1.P.Seq | F | M00056753:110 | CH16COP |
| 1625 | 561382 | RTA22200026F.c.05.1.P.Seq | F | M00055413:27 | CH17COHLV |
| 1626 | 3447 | RTA22200227F.k.15.1.P.Seq | F | M00006705:19 | CH02COH |
| 1627 | 639896 | RTA22200012F.c.15.1.P.Seq | F | M00056684:611 | CH16COP |
| 1628 | 1353 | RTA22200241F.e.20.1.P.Seq | F | M00026890:42 | CH02COH |
| 1629 | 3031 | RTA22200229F.i.23.1.P.Seq | F | M00006996:610 | CH02COH |
| 1630 | 557928 | RTA22200021F.g.03.3.P.Seq | F | M00054765:35 | CH17COHLV |
| 1631 | 4727 | RTA22200237F.n.09.1.P.Seq | F | M00022829:810 | CH03MAH |
| 1632 | 4046 | RTA22200226F.g.16.1.P.Seq | F | M00005655:68 | CH02COH |
| 1633 | 10882 | RTA22200241F.b.11.1.P.Seq | F | M00926861:19 | CH04MAL |
| 1634 | 646283 | RTA22200007F.c.22.1.P.Seq | F | M00056161:74 | CH15CON |
| 1635 | 646283 | RTA22200002F.d.05.1.P.Seq | F | M00055448:57 | CH15CON |
| 1636 | 139516 | RTA22200242F.e.16.1.P.Seq | F | M00007131:11 | CH02COH |
| 1637 | 6184 | RTA22200230F.e.13.1.P.Seq | F | M00007131:11 | CH02COH |
| 1638 | 6184 | RTA22200228F.c.12.1.P.Seq | F | M00006795:13 | CH02COH |
| 1639 | 454653 | RTA22200013F.e.17.1.P.Seq | F | M00056830:72 | CH16COP |
| 1640 | 3309 | RTA22200232F.c.11.1.P.Seq | F | M00021911:83 | CH03MAH |
| 1641 | 1037 | RTA22200248F.e..02.1P.Seq | F | M00027535:58 | CH04MAL |
| 1642 | 450665 | RTA22200002F.g.06.1.P.Seq | F | M00055491:78 | CH15CON |
| 1643 | 726307 | RTA22200016F.b.16.1.P.Seq | F | M00057167:512 | CH16COP |
| 1644 | 447669 | RTA22200001F.b.14.1.P.Seq | F | M00042538:56 | CH15CON |
| 1645 | 639651 | RTA22200003F.b.15.1.P.Seq | F | M00055584:76 | CH15CON |
| 1646 | 736860 | RTA22200015F.b.11.1.P.Seq | F | M00057049:76 | CH16COP |
| 1647 | 553705 | RTA22200025F.j.22.1.P.Seq | F | M00055371:61 | CH17COHLV |
| 1648 | 451375 | RTA22200018F.j.20.1.P.Seq | F | M00043336:58 | CH17COHLV |
| 1649 | 204862 | RTA22200006F.h.24.2.P.Seq | F | M00056058:84 | CH15CON |
| 1650 | 530883 | RTA22200011F.o.17.1.P.Seq | F | M00056652:64 | CH16COP |
| 1651 | 447539 | RTA22200001F.e.22.1.P.Seq | F | M00042575:41 | CH15CON |
| 1652 | 455096 | RTA22200020F.m.23.1.P.Seq | F | M00054680:211 | CH17COHLV |
| 1653 | 8336 | RTA22200235F.g.01.1.P.Seq | F | M00022470:71 | CH03MAH |
| 1654 | 449142 | RTA22200006F.f.09.2.P.Seq | F | M00056041:34 | CH15CON |
| 1655 | 557401 | RTA22200003F.j.04.1.P.Seq | F | M00055668:27 | CH15CON |
| 1656 | 418763 | RTA22200002F.e.07.1.P.Seq | F | M00055454:75 | CH15SCON |
| 1657 | 17649 | RTA22200238F.b.23.1.P.Seq | F | M00022876:48 | CH03MAH |
| 1658 | 2078 | RTA22200238F.h.11.1.P.Seq | F | M00022928:63 | CH03MAH |
| 1659 | 640370 | RTA22206010F.g.14.1.P.Seq | F | M00056410:54 | CH16COP |
| 1660 | 449269 | RTA22200005F.h.22.1.P.Seq | F | M00055906:410 | CH15CON |
| 1661 | 639029 | RTA22200006F.o.10.2.P.Seq | F | M00056114:36 | CH15CON |
| 1662 | 448677 | RTA22200023F.l.07.1.P.Seq | F | M00055088:59 | CH17COHLV |
| 1663 | 349 | RTA22200233F.a.09.1.P.Seq | F | M00008014:21 | CH03MAH |
| 1664 | 447494 | RTA22200002F.e.05.1.P.Seq | F | M00055454:811 | CH15CON |
| 1665 | 551433 | RTA22200021F.k.12.3.P.Seq | F | M00054816:411 | CH17COHLV |
| 1666 | 414739 | RTA22200019F.f.07.1.P.Seq | F | M00043508:31 | CH17COHLV |
| 1667 | 640525 | RTA22200002F.n.01.1.P.Seq | F | M00055543:35 | CH15CON |
| 1668 | 640525 | RTA22200002F.m.24.1.P.Seq | F | M00055543:35 | CH15CON |
| 1669 | 233108 | RTA22200002F.p.10.1.P.Seq | F | M00055560:212 | CH15CON |
| 1670 | 643594 | RTA22200003F.l.06.1.P.Seq | F | M00055687:61 | CH15CON |
| 1671 | 1642 | RTA22200231F.a.18.1.P.Seq | F | M00007931:110 | CH03MAH |
| 1672 | 643804 | RTA22200003F.h.09.1.P.Seq | F | M00055656:59 | CH15CON |
| 1673 | 449701 | RTA22200012F.h.22.1.P.Seq | F | M00056723:311 | CH16COP |
| 1674 | 185695 | RTA22200242F.c.21.1.P.Seq | F | M00026986:810 | CH04MAL |
| 1675 | 555830 | RTA22200003F.k.13.1.P.Seq | F | M00055679:17 | CH15CON |
| 1676 | 227936 | RTA22200010F.n.11.1.P.Seq | F | M00056505:47 | CH16COP |
| 1677 | 1609 | RTA22200226F.g.09.1.P.Seq | F | M00005650:16 | CH02COH |
| 1678 | 643938 | RTA22200005F.o.22.1.P.Seq | F | M00055980:110 | CH15CON |
| 1679 | 3656 | RTA22200227F.e.24.1.P.Seq | F | M00006641:83 | CH02COH |
| 1680 | 16576 | RTA22200248F.e.07.1.P.Seq | F | M00027536:712 | CH04MAL |
| 1681 | 9784 | RTA22200243F.c.16.1.P.Seq | F | M00027093:28 | CH04MAL |
| 1682 | 2557 | RTA22200228F.p.12.2.P.Seq | F | M00006917:48 | CH02COH |
| 1683 | 4620 | RTA22200237F.o.15.1.P.Seq | F | M00022834:71 | CH03MAH |
| 1684 | 43642 | RTA22200021F.p.23.2.P.Seq | F | M00054865:84 | CH17COHLV |
| 1685 | 555103 | RTA22200016F.l.08.1.P.Seq | F | M00005724:36 | CH16COP |
| 1686 | 643341 | RTA22200002F.g.16.1.P.Seq | F | M00055495:72 | CH15CON |
| 1687 | 185531 | RTA22200248F.l.12.1.P.Seq | F | M00027588:31 | CH04MAL |
| 1688 | 4045 | RTA22200224F.b.17.1.P.Seq | F | M00004842:27 | CH02COH |
| 1689 | 400258 | RTA22200011F.e.10.1.P.Seq | F | M00056557:42 | CH16COP |
| 1690 | 96618 | RTA22200248F.j.22.1.P.Seq | F | M00027581:51 | CH04MAL |
| 1691 | 646060 | RTA22200007F.p.23.1.P.Seq | F | M00056291:71 | CH15CON |
| 1692 | 5665 | RTA22200232F.a.17.1.P.Seq | F | M00021854:57 | CH03MAH |
| 1693 | 149265 | RTA22200241F.o.03.1.P.Seq | F | M00026951:43 | CH04MAL |
| 1694 | 727314 | RTA22200012F.g.14.1.P.Seq | F | M00056714:86 | CH16COP |
| 1695 | 736349 | RTA22200014F.d.03.1.P.Seq | F | M00056947:69 | CH16COP |
| 1996 | 648931 | RTA22200006F.k.13.2.P.Seq | F | M00056081:25 | CH15CON |
| 1697 | 553881 | RTA22200003F.m.10.1.P.Seq | F | M00055703:79 | CH15CON |
| 1698 | 7444 | RTA22200235F.d.02.1.P.Seq | F | M00022440:41 | CH03MAH |
| 1699 | 150 | RTA22200235F.p.14.2.P.Seq | F | M00022571:411 | CH03MAH |
| 1700 | 2889 | RTA22200228F.p.09.2.P.Seq | F | M00006917:15 | CH02COH |
| 1701 | 730670 | RTA22200013F.a.09.1.P.Seq | F | M00056793:87 | CH16COP |
| 1702 | 560984 | RTA22200021F.n.20.2.P.Seq | F | M00054851:53 | CH17COHLV |
| 1703 | 453708 | RTA22200026F.e.10.1.P.Seq | F | M00055425:35 | CH17COHLV |
| 1704 | 48977 | RTA22200024F.p.08.1.P.Seq | F | M00055259:64 | CH17COHLV |
| 1705 | 547916 | RTA22200008F.g.01.1.P.Seq | F | M00056459:37 | CH15CON |
| 1706 | 547916 | RTA22200008F.f.24.1.P.Seq | F | M00056459:37 | CH15CON |
| 1707 | 97507 | RTA22200023F.p.11.1.P.Seq | F | M00055134:82 | CH17COHLV |
| 1708 | 735966 | RTA22200012F.n.08.1.P.Seq | F | M00056766:110 | CH16COP |
| 1709 | 35 | RTA22200012F.m.20.1.P.Seq | F | M00056760:14 | CH16COP |
| 1710 | 650195 | RTA22200002F.m.11.1.P Seq | F | M00055536:63 | CH15CON |
| 1711 | 639705 | RTA22200002F.i.11.1.P.Seq | F | M00055510:27 | CH15CON |
| 1712 | 185465 | RTA22200013F.c.17.1.P.Seq | F | M00056817:33 | CH16COP |
| 1713 | 378525 | RTA22200015F.h.03.1.P.Seq | F | M00057091:33 | CH16COP |
| 1714 | 2889 | RTA22200228F.p.10.2.P.Seq | F | M00006917:14 | CH02COH |
| 1715 | 557686 | RTA22200025F.f.19.1.P.Seq | F | M00055334:89 | CH17COHLV |
| 1716 | 735786 | RTA22200010F.h.02.1.P.Seq | F | M00056414:15 | CH16COP |
| 1717 | 455145 | RTA22200003F.f.10.1.P.Seq | F | M00055636:610 | CH15CON |
| 1718 | 639667 | RTA22200002F.k.13.1.P.Seq | F | M00055525:27 | CH15CON |
| 1719 | 446913 | RTA22200001F.m.21.1.P.Seq | F | M00042905:310 | CH15CON |
| 1720 | 402494 | RTA22200014F.c.09.2.P.Seq | F | M00056941:52 | CH16COP |
| 1721 | 734256 | RTA22200014F.l.11.1.P.Seq | F | M00057005:43 | CH16COP |
| 1722 | 734256 | RTA22200012F.g.05.1.P.Seq | F | M00056711:15 | CH16COP |
| 1723 | 559362 | RTA22200023F.n.21.1.P.Seq | F | M00055115:55 | CH17COHLV |
| 1724 | 639651 | RTA22200003F.c.22.1.P.Seq | F | M00055597:58 | CH15CON |
| 1725 | 419774 | RTA22200008F.g.11.1.P.Seq | F | M00056466:52 | CH15CON |
| 1726 | 555318 | RTA22200025F.a.17.1.P.Seq | F | M00055271:35 | CH17COHLV |
| 1727 | 449956 | RTA22200010F.b.08.1.P.Seq | F | M00056359:111 | CH16COP |
| 1728 | 558427 | RTA22200015F.p.12.1.P.Seq | F | M00057146:39 | CH16COP |
| 1729 | 7531 | RTA22200225F.j.13.1.P.Seq | F | M00005491:812 | CH02COH |
| 1730 | 446514 | RTA22200001F.a.16.1.P.Seq | F | M00042527:47 | CH15CON |
| 1731 | 456808 | RTA22200010F.o.15.1.P.Seq | F | M00056512:59 | CH16COP |
| 1732 | 447035 | RTA22200003F.f.08.1.P.Seq | F | M00055635:510 | CH15CON |
| 1733 | 446913 | RTA22200001F.j.16.1.P.Seq | F | M00042742:16 | CH15CON |
| 1734 | 446900 | RTA22200022F.g.20.1.P.Seq | F | M00054934:43 | CH17COHLV |
| 1735 | 504513 | RTA22200003F.f.07.1.P.Seq | F | M00055635:810 | CH15CON |
| 1736 | 380477 | RTA22200014F.j.09.1.P.Seq | F | M00056993:26 | CH16COP |
| 1737 | 1213 | RTA22200244F.p.13.1.P.Seq | F | M00027231:13 | CH04MAL |
| 1738 | 8259 | RTA22200222F.J.14.1.P.Seq | F | M00004093:310 | CH01COH |
| 1739 | 8259 | RTA22200222F.h.23.1.P.Seq | F | M00003922:83 | CH01COH |
| 1740 | 552968 | RTA22200019F.d.20.1.P.Seq | F | M00043503:38 | CH17COHLV |
| 1741 | 650845 | RTA22200010F.o.09.1.P.Seq | F | M00056511:812 | CH16COP |
| 1742 | 648594 | RTA22200014F.h.17.1.P.Seq | F | M00056977:73 | CH16COP |
| 1743 | 648594 | RTA22200014F.h.17.2.P.Seq | F | M00056977:73 | CH16COP |
| 1744 | 2796 | RTA22200240F.c.13.1.P.Seq | F | M00023331:111 | CH04MAL |
| 1745 | 5753 | RTA22200227F.f.13.1.P.Seq | F | M00006648:15 | CH02COH |
| 1746 | 734256 | RTA22200014F.l.11.2.P.Seq | F | M00057005:43 | CH16COP |
| 1747 | 449580 | RTA22200007F.p.19.1.P.Seq | F | M00056290:58 | CH15CON |
| 1748 | 553705 | RTA22200021F.a.23.2.P.Seq | F | M00054726:68 | CH17COHLV |
| 1749 | 730670 | RTA22200011F.n.02.1.P.Seq | F | M00056638:21 | CH16COP |
| 1750 | 15035 | RTA22200001F.c.07.1.P.Seq | F | M00042544:610 | CH15CON |
| 1751 | 394436 | RTA22200002F.o.12.1.P.Seq | F | M00055552:39 | CH15CON |
| 1752 | 726810 | RTA22200011F.h.22.1.P.Seq | F | M00056592:33 | CH16COP |
| 1753 | 352763 | RTA22200022F.j.12.1.P.Seq | F | M00054949:17 | CH17COHLV |
| 1754 | 3506 | RTA22200240F.i.14.1.P.Seq | F | M00023414:63 | CH04MAL |
| 1755 | 726377 | RTA22200015F.i.14.1.P.Seq | F | M00057100:23 | CH16COP |
| 1756 | 562111 | RTA22200018F.d.10.1.P.Seq | F | M00042460:17 | CH17COHLV |
| 1757 | 404475 | RTA22200010F.m.04.1.P.Seq | F | M00056496:89 | CH16COP |
| 1758 | 13824 | RTA22200234F.m.16.1.P.Seq | F | M00022370:72 | CH03MAH |
| 1759 | 558222 | RTA22200019F.h.07.1.P.Seq | F | M00054502:41 | CH17COHLV |
| 1760 | 2834 | RTA22200224F.p.09.1.P.Seq | F | M00005406:111 | CH02COH |
| 1761 | 453470 | RTA22200001F.a.10.1.P.Seq | F | M00042523:35 | CH15CON |
| 1762 | 558682 | RTA22200015F.o.16.1.P.Seq | F | M00057141:22 | CH16COP |
| 1763 | 641710 | RTA22200016F.j.03.1.P.Seq | F | M00057231:79 | CH16COP |
| 1764 | 640221 | RTA22200013F.k.12.1.P.Seq | F | M00056874:71 | CH16COP |
| 1765 | 559057 | RTA22200016F.n.11.1.P.Seq | F | M00057270:89 | CH16COP |
| 1766 | 551433 | RTA22200025F.m.12.2.P.Seq | F | M00055385:76 | CH17COHLV |
| 1767 | 5729 | RTA22200228F.f.10.1.P.Seq | F | M00006819:25 | CH02COH |
| 1768 | 352763 | RTA22200022F.g.09.1.P.Seq | F | M00054931:19 | CH17COHLV |
| 1769 | 375651 | RTA22200012F.m.08.1.P.Seq | F | M00056757:63 | CH16COP |
| 1770 | 644032 | RTA22200012F.m.04.1.P.Seq | F | M00056756:15 | CH16COP |
| 1771 | 185562 | RTA22200240F.j.15.1.P.Seq | F | M00023428:611 | CH04MAL |
| 1772 | 736349 | RTA22200014F.d.03.2.P.Seq | F | M00056947:69 | CH16COP |
| 1773 | 638870 | RTA22200012F.h.13.1.P.Seq | F | M00056721:67 | CH16COP |
| 1774 | 649719 | RTA22200012F.k.03.1.P.Seq | F | M00056739:48 | CH16COP |
| 1775 | 62016 | RTA22200026F.d.09.1.P.Seq | F | M00055420:74 | CH17COHLV |
| 1776 | 2889 | RTA22200229F.p.17.1.P.Seq | F | M00007084:74 | CH02COH |
| 1777 | 647135 | RTA22200010F.k.08.1.P.Seq | F | M00056480:110 | CH16COP |
| 1778 | 8283 | RTA22200224F.g.10.1.P.Seq | F | M00005309:55 | CH02COH |
| 1779 | 732121 | RTA22200014F.d.06.1.P.Seq | F | M00056949:66 | CH16COP |
| 1780 | 532307 | RTA22200022F.h.09.1.P.Seq | F | M00054937:112 | CH17COHLV |
| 1781 | 6589 | RTA22200226F.n.24.1.P.Seq | F | M00005810:67 | CH02COH |
| 1782 | 554678 | RTA22200010F.b.19.1.P.Seq | F | M00056363:26 | CH16COP |
| 1783 | 450410 | RTA22200021F.a.09.2.P.Seq | F | M00054722:41 | CH17COHLV |
| 1784 | 643924 | RTA22200002F.a.21.1.P.Seq | F | M00055427:61 | CH15CON |
| 1785 | 453719 | RTA22200002F.a.17.1.P.Seq | F | M00055426:86 | CH15CON |
| 1786 | 451811 | RTA22200003F.k.17.1.P.Seq | F | M00055681:72 | CH15CON |
| 1787 | 453059 | RTA22200003F.b.22.1.P.Seq | F | M00055586:62 | CH15CON |
| 1788 | 453457 | RTA22200021F.a.06.2.P.Seq | F | M00054721:611 | CH17COHLV |
| 1789 | 558454 | RTA22200020F.a.20.1.P.Seq | F | M00054572:31 | CH17COHLV |
| 1790 | 417467 | RTA22200025F.c.11.1.P.Seq | F | M00055289:42 | CH17COHLV |
| 1791 | 447850 | RTA22200001F.a.23.1.P.Seq | F | M00042532:68 | CH15CON |
| 1792 | 557948 | RTA22200024F.n.05.1.P.Seq | F | M00055245:19 | CH17COHLV |
| 1793 | 452685 | RTA22200022F.b.14.1.P.Seq | F | M00054877:812 | CH17COHLV |
| 1794 | 446964 | RTA22200019F.e.05.1.P.Seq | F | M00043504:78 | CH17COHLV |
| 1795 | 550318 | RTA22200021F.d.04.2.P.Seq | F | M00054741:310 | CH17COHLV |
| 1796 | 407077 | RTA22200023F.p.13.1.P.Seq | F | M00055134:23 | CH17COHLV |
| 1797 | 650864 | RTA22200007F.o.19.1.P.Seq | F | M00056282:44 | CH15CON |
| 1798 | 644721 | RTA22200003F.p.16.1.P.Seq | F | M00055731:812 | CH15CON |
| 1799 | 485431 | RTA22200013F.l.17.1.P.Seq | F | M00056885:36 | CH16COP |
| 1800 | 651073 | RTA22200007F.f.05.1.P.Seq | F | M00056186:62 | CH15CON |
| 1801 | 725811 | RTA22200012F.o.17.1.P.Seq | F | M00056776:49 | CH16COP |
| 1802 | 645139 | RTA22200005F.k.02.1.P.Seq | F | M00055924:811 | CH15CON |
| 1803 | 185478 | RTA22200248F.j.05.1.P.Seq | F | M00027578:65 | CH04MAL |
| 1804 | 1441 | RTA22200228F.j.04.2.P.Seq | F | M00006859:44 | CH02COH |
| 1805 | 640005 | RTA22200002F.i.16.1.P.Seq | F | M00055511:59 | CH15CON |
| 1806 | 728273 | RTA22200015F.h.04.1.P.Seq | F | M00057091:34 | CH16COP |
| 1807 | 185579 | RTA22200242F.e.07.1.P.Seq | F | M00026996:16 | CH04MAL |
| 1808 | 724473 | RTA22200012F.f.23.1.P.Seq | F | M00056711:31 | CH16COP |
| 1809 | 559674 | RTA22200014F.h.06.1.P.Seq | F | M00056974:64 | CH16COP |
| 1810 | 456026 | RTA22200005F.d.13.1.P.Seq | F | M00055873:53 | CH15CON |
| 1811 | 549320 | RTA22200022F.a.02.1.P.Seq | F | M00054867:37 | CH17COHLV |
| 1812 | 447338 | RTA22200001F.k.04.1.P.Seq | F | M00042746:29 | CH15CON |
| 1813 | 560700 | RTA22200002F.b.09.1.P.Seq | F | M00055430.82 | CH15CON |
| 1814 | 3070 | RTA22200021F.g.19.3.P.Seq | F | M00054769:67 | CH17COHLV |
| 1815 | 3070 | RTA22200002F.f.03.1.P.Seq | F | M00055463:810 | CH15CON |
| 1816 | 380477 | RTA22200014F.j.09.2.P.Seq | F | M00056993:26 | CH16COP |
| 1817 | 735040 | RTA22200015F.b.05.1.P.Seq | F | M00057047:32 | CH16COP |
| 1818 | 378525 | RTA22200009F.j.16.2.P.Seq | F | M00042826:33 | CH16COP |
| 1819 | 284586 | RTA22200009F.c.23.2.P.Seq | F | M00042756:21 | CH16COP |
| 1820 | 640276 | RTA22200014F.e.15.2.P.Seq | F | M00056956:61 | CH16COP |
| 1821 | 3344 | RTA22200230F.j.07.1.P.Seq | F | M00007178:43 | CH02COH |
| 1822 | 555830 | RTA22200005F.b.23.1.P.Seq | F | M00055861:43 | CH15CON |
| 1823 | 726307 | RTA22200011F.i.10.1.P.Seq | F | M00056595:62 | CH16COP |
| 1824 | 416 | RTA22200011F.m.06.1.P.Seq | F | M00056631:75 | CH16COP |
| 1825 | 2543 | RTA22200225F.o.10.1.P.Seq | F | M00005545:18 | CH02COH |
| 1826 | 639352 | RTA22200001F.n.09.1.P.Seq | F | M00042908:71 | CH15CON |
| 1827 | 453592 | RTA22200009F.l.04.1.P.Seq | F | M00042842:31 | CH16COP |
| 1828 | 450633 | RTA22200006F.n.19.2.P.Seq | F | M00056107:56 | CH15CON |
| 1829 | 448383 | RTA22200009F.l.15.2.P.Seq | F | M00042844:312 | CH16COP |
| 1830 | 648719 | RTA22200008F.a.08.1.P.Seq | F | M00056293:65 | CH15CON |
| 1831 | 730655 | RTA22200012F.h.16.1.P.Seq | F | M00056722:71 | CH16COP |
| 1832 | 141185 | RTA22200007F.j.21.2.P.Seq | F | M00056228:17 | CH15CON |
| 1833 | 640498 | RTA22200003F.m.07.1.P.Seq | F | M00055703:28 | CH15CON |
| 1834 | 9029 | RTA22200222F.l.08.1.P.Seq | F | M00004087:211 | CH01COH |
| 1835 | 559674 | RTA22200014F.h.06.2.P.Seq | F | M00056974:64 | CH16COP |
| 1836 | 555734 | RTA22200021F.n.09.2.P.Seq | F | M00054844:66 | CH17COHLV |
| 1837 | 1943 | RTA22200017F.d.22.1.P.Seq | F | M00057333:69 | CH16COP |
| 1838 | 648320 | RTA22200004F.d.05.1.P.Seq | F | M00055761:33 | CH15CON |
| 1839 | 558098 | RTA22200024F.p.10.1.P.Seq | F | M00055260:15 | CH17COHLV |
| 1840 | 468672 | RTA22200004F.h.23.1.P.Seq | F | M00055794:26 | CH15CON |
| 1841 | 456596 | RTA22200022F.f.19.1.P.Seq | F | M00054926:61 | CH17COHLV |
| 1842 | 649722 | RTA22200012F.n.07.1.P.Seq | F | M00056765:410 | CH16COP |
| 1843 | 550708 | RTA22200022F.o.19.1.P.Seq | F | M00054996:211 | CH17COHLV |
| 1844 | 643931 | RTA22200005F.n.14.1.P.Seq | F | M00055966:13 | CH15CON |
| 1845 | 726927 | RTA22200011F.j.08.1.P.Seq | F | M00056603:41 | CH16COP |
| 1846 | 459012 | RTA22200007F.b.13.1.P.Seq | F | M00056149:21 | CH15CON |
| 1847 | 397773 | RTA22200003F.c.13.1.P.Seq | F | M00055592:15 | CH15CON |
| 1848 | 450004 | RTA22200011F.f.04.1.P.Seq | F | M00056566:81 | CH16COP |
| 1849 | 649732 | RTA22200007F.o.23.1.P.Seq | F | M00056282:89 | CH15CON |
| 1850 | 553955 | RTA22200021F.f.08.3.P.Seq | F | M00054755:86 | CH17COHLV |
| 1851 | 646309 | RTA22200012F.h.04.1.P.Seq | F | M00056718:21 | CH16COP |
| 1852 | 402727 | RTA22200024F.m.16.1.P.Seq | F | M00055243:64 | CH17COHLV |
| 1853 | 468736 | RTA22200024F.m.17.1.P.Seq | F | M00055243:71 | CH17COHLV |
| 1854 | 650422 | RTA22200007F.a.16.1.P.Seq | F | M00056141:45 | CH15CON |
| 1855 | 730533 | RTA22200013F.b.15.1.P.Seq | F | M00056808:212 | CH16COP |
| 1856 | 726307 | RTA22200015F.a.17.1.P.Seq | F | M00057044:66 | CH16COP |
| 1857 | 450311 | RTA22200005F.j.22.1.P.Seq | F | M00055922:32 | CH15CON |
| 1858 | 450940 | RTA22200001F.j.15.1.P.Seq | F | M00042742:83 | CH15CON |
| 1859 | 726786 | RTA22200015F.f.06.1.P.Seq | F | M00057077:42 | CH16COP |
| 1860 | 7634 | RTA22200235F.b.19.1.P.Seq | F | M00022420:83 | CH03MAH |
| 1861 | 230995 | RTA22200016F.e.14.1.P.Seq | F | M00057196:64 | CH16COP |
| 1862 | 374770 | RTA22200003F.n.21.1.P.Seq | F | M00055720:16 | CH15CON |
| 1863 | 9275 | RTA22200249F.g.11.1.P.Seq | F | M00027665:41 | CH04MAL |
| 1864 | 553860 | RTA22200023F.k.02.1.P.Seq | F | M00055077:611 | CH17COHLV |
| 1865 | 452010 | RTA22200001F.m.07.1.P.Seq | F | M00042900:37 | CH15CON |
| 1866 | 649560 | RTA22200015F.j.16.1.P.Seq | F | M00057106:52 | CH16COP |
| 1867 | 452704 | RTA22200008F.b.18.1.P.Seq | F | M00056307:812 | CH15CON |
| 1868 | 447594 | RTA22200007F.j.10.1.P.Seq | F | M00056225:79 | CH15CON |
| 1869 | 555444 | RTA22200015F.n.10.1.P.Seq | F | M00057130:811 | CH16COP |
| 1870 | 736556 | RTA22200017F.c.20.1.P.Seq | F | M00057318:13 | CH16COP |
| 1871 | 5289 | RTA22200235F.l.12.1.P.Seq | F | M00022533:56 | CH03MAH |
| 1872 | 732121 | RTA22200015F.c.11.1.P.Seq | F | M00057059:66 | CH16COP |
| 1873 | 452567 | RTA22200009F.f.12.1.P.Seq | F | M00042783:13 | CH16COP |
| 1874 | 551634 | RTA22200002F.n.04.1.P.Seq | F | M00055544:54 | CH15CON |
| 1875 | 644099 | RTA22200005F.g.07.1.P.Seq | F | M00055887:67 | CH15CON |
| 1876 | 726788 | RTA22200012F.h.08.1.P.Seq | F | M00056719:19 | CH16COP |
| 1877 | 638802 | RTA22200012F.a.02.1.P.Seq | F | M00056662:63 | CH16C0P |
| 1878 | 646283 | RTA22200002F.o.18.1.P.Seq | F | M00055553:82 | CH15CON |
| 1879 | 8403 | RTA22200238F.n.03.1.P.Seq | F | M00022998:38 | CH03MAH |
| 1880 | 2224 | RTA22200233F.g.23.1.P.Seq | F | M00008079:33 | CH03MAH |
| 1881 | 650053 | RTA22200008F.g.02.1.P.Seq | F | M00056459:47 | CH15CON |
| 1882 | 380477 | RTA22200008F.e.20.1.P.Seq | F | M00056437:87 | CH15CON |
| 1883 | 450867 | RTA22200019F.a.09.1.P.Seq | F | M00043386:16 | CH17COHLV |
| 1884 | 456764 | RTA22200003F.n.22.1.P.Seq | F | M00055720:11 | CH15CON |
| 1885 | 641373 | RTA22200003F.b.11.1.P.Seq | F | M00055583:24 | CH15CON |
| 1886 | 555882 | RTA22200004F.m.12.1.P.Seq | F | M00055818:510 | CH15CON |
| 1887 | 644046 | RTA22200008F.b.04.1.P.Seq | F | M00056302:612 | CH15CON |
| 1888 | 447250 | RTA22200009F.d.15.2.P.Seq | F | M00042760:37 | CH16COP |
| 1889 | 456596 | RTA22200022F.o.14.1.P.Seq | F | M00054995:310 | CH17COHLV |
| 1890 | 2218 | RTA22200225F.d.15.1.P.Seq | F | M00005447:41 | CH02COH |
| 1891 | 446450 | RTA22200001F.h.16.1.P.Seq | F | M00042718:33 | CH15CON |
| 1892 | 640889 | RTA22200003F.l.12.1.P.Seq | F | M00055691:57 | CH15C0N |
| 1893 | 530774 | RTA22200025F.n.12.2.P.Seq | F | M00055391:78 | CH17COHLV |
| 1894 | 649062 | RTA22200002F.j.14.1.P.Seq | F | M00055519:87 | CH15CON |
| 1895 | 12808 | RTA22200233F.m.15.1.P.Seq | F | M00021649:512 | CH03MAH |
| 1896 | 468672 | RTA22200001F.g.11.1.P.Seq | F | M00042704:64 | CH15CON |
| 1897 | 650773 | RTA22200008F.d.12.1.P.Seq | F | M00056324:42 | CH15CON |
| 1898 | 732237 | RTA22200014F.i.12.2.P.Seq | F | M00056994:67 | CH16COP |
| 1899 | 650773 | RTA22200001F.o.15.1.P.Seq | F | M00054798:61 | CH15CON |
| 1900 | 550216 | RTA22200021F.b.09.2.P.Seq | F | M00054727:86 | CH17COHLV |
| 1901 | 639189 | RTA22200002F.n.20.1.P.Seq | F | M00055547:55 | CH15CON |
| 1902 | 3447 | RTA22200227F.l.17.1.P.Seq | F | M00006719:87 | CH02COH |
| 1903 | 2012 | RTA22200248F.c.03.1.P.Seq | F | M00027524:211 | CH04MAL |
| 1904 | 642876 | RTA22200005F.b.13.1.P.Seq | F | M00055856:64 | CH15CON |
| 1905 | 449690 | RTA22200009F.j.10.2.P.Seq | F | M00042823:74 | CH16COP |
| 1906 | 451208 | RTA22200004F.k.07.1.P.Seq | F | M00055804:63 | CH15CON |
| 1907 | 725811 | RTA22200011F.k.18.1.P.Seq | F | M00056616:38 | CH16COP |
| 1908 | 1256 | RTA22200232F.b.11.1.P.Seq | F | M00021869:41 | CH03MAH |
| 1909 | 446599 | RTA22200004F.f.18.1.P.Seq | F | M00055780:78 | CH15CON |
| 1910 | 446537 | RTA22200001F.c.05.1.P.Seq | F | M00042544:42 | CH15CON |
| 1911 | 726281 | RTA22200010F.l.02.1.P.Seq | F | M00056484:72 | CH16COP |
| 1912 | 11286 | RTA22200226F.n.17.1.P.Seq | F | M00005802:810 | CH02COH |
| 1913 | 556082 | RTA22200022F.p.11.1.P.Seq | F | M00055005:811 | CH17COHLV |
| 1914 | 97507 | RTA22200005F.a.21.1.P.Seq | F | M00055851:711 | CH17COHLV |
| 1915 | 535955 | RTA22200022F.b.11.1.P.Seq | F | M00054876:73 | CH17COHLV |
| 1916 | 728251 | RTA22200011F.i.08.1.P.Seq | F | M00056595:37 | CH16COP |
| 1917 | 733849 | RTA22200015F.g.08.1.P.Seq | F | M00057085:13 | CH16COP |
| 1918 | 447574 | RTA22200014F.k.20.2.P.Seq | F | M00057002:25 | CH16COP |
| 1919 | 7607 | RTA22200229F.g.17.1.P.Seq | F | M00006976:45 | CH02COH |
| 1920 | 644032 | RTA22200010F.i.21.1.P.Seq | F | M00056425:23 | CH16COP |
| 1921 | 454087 | RTA22200012F.f.13.1.P.Seq | F | M00056709:15 | CH16COP |
| 1922 | 412364 | RTA22200007F.p.02.1.P.Seq | F | M00056283:33 | CH15CON |
| 1923 | 535208 | RTA22200002F.m.04.1.P.Seq | F | M00055534:81 | CH15CON |
| 1924 | 644609 | RTA22200002F.m.21.1.P.Seq | F | M00055542:66 | CH15CON |
| 1925 | 645073 | RTA22200004F.o.14.1.P.Seq | F | M00055830:710 | CH15CON |
| 1926 | 417467 | RTA22200012F.g.08.1.P.Seq | F | M00056712:26 | CH16COP |
| 1927 | 554188 | RTA22200004F.n.02.1.P.Seq | F | M00055821:712 | CH15CON |
| 1928 | 647185 | RTA22200005F.n.02.1.P.Seq | F | M00055958:62 | CH15CON |
| 1929 | 736679 | RTA22200012F.a.20.1.P.Seq | F | M00056666:38 | CH16COP |
| 1930 | 553547 | RTA22200022F.j.02.1.P.Seq | F | M00054947:712 | CH17COHLV |
| 1931 | 641524 | RTA22200016F.c.06.1.P.Seq | F | M00057170:83 | CH16COP |
| 1932 | 649717 | RTA22200003F.f.02.1.P.Seq | F | M00055633:12 | CH15CON |
| 1933 | 451041 | RTA22200018F.a.16.1.P.Seq | F | M00042355:31 | CH17COHLV |
| 1934 | 3483 | RTA22200225F.e.24.1.P.Seq | F | M00005459:21 | CH02COH |
| 1935 | 500959 | RTA22200008F.c.24.1.P.Seq | F | M00056323:810 | CH15CON |
| 1936 | 500959 | RTA22200008F.d.01.1.P.Seq | F | M00056323:810 | CH15CON |
| 1937 | 697 | RTA22200233F.b.10.1.P.Seq | F | M00008020:33 | CH03MAH |
| 1938 | 736955 | RTA22200013F.f.22.1.P.Seq | F | M00056840:89 | CH16COP |
| 1939 | 554742 | RTA22200004F.l.14.1.P.Seq | F | M00055811:312 | CH15CON |
| 1940 | 642973 | RTA22200015F.n.14.1.P.Seq | F | M00057132:68 | CH16COP |
| 1941 | 449437 | RTA22200008F.b.13.1.P.Seq | F | M00056304:711 | CH15CON |
| 1942 | 467991 | RTA22200002F.j.11.1.P.Seq | F | M00055517:43 | CH15CON |
| 1943 | 650204 | RTA22200004F.n.13.1.P.Seq | F | M00055825:53 | CH15CON |
| 1944 | 640618 | RTA22200004F.p.17.1.P.Seq | F | M00055840:46 | CH15CON |
| 1945 | 452366 | RTA22200002F.j.05.1.P.Seq | F | M00055514:85 | CH15CON |
| 1946 | 640276 | RTA22200012F.p.05.1.P.Seq | F | M00056780:69 | CH16COP |
| 1947 | 554101 | RTA22200012F.f.24.1.P.Seq | F | M00056711:65 | CH16COP |
| 1948 | 185432 | RTA22200249F.p.01.1.P.Seq | F | M00027742:21 | CH04MAL |
| 1949 | 455598 | RTA22200022F.m.06.1.P.Seq | F | M00054970:73 | CH17COHLV |
| 1950 | 649354 | RTA22200001F.o.05.1.P.Seq | F | M00054792:59 | CH15CON |
| 1951 | 4408 | RTA22200242F.j.13.1.P.Seq | F | M00027034:49 | CH04MAL |
| 1952 | 452366 | RTA22200006F.o.03.2.P.Seq | F | M00056110:49 | CH15CON |
| 1953 | 452366 | RTA22200001F.e.02.1.P.Seq | F | M00042563:79 | CH15CON |
| 1954 | 727331 | RTA22200016F.a.19.1.P.Seq | F | M00057161:59 | CH16COP |
| 1955 | 644853 | RTA22200008F.a.05.1.P.Seq | F | M00056293:58 | CH15CON |
| 1956 | 554079 | RTA22200014F.k.21.2.P.Seq | F | M00057002:26 | CH16COP |
| 1957 | 556245 | RTA22200023F.l.05.1.P.Seq | F | M00055088:112 | CH17COHLV |
| 1958 | 557388 | RTA22200012F.p.13.1.P.Seq | F | M00056783:711 | CH16COP |
| 1959 | 449468 | RTA22200012F.l.11.1.P.Seq | F | M00056752:51 | CH16COP |
| 1960 | 556245 | RTA22200023F.o.12.1.P.Seq | F | M00055125:56 | CH17COHLV |
| 1961 | 455327 | RTA22200013F.b.03.1.P.Seq | F | M00056804:56 | CH16COP |
| 1962 | 546632 | RTA22200015F.a.10.1.P.Seq | F | M00057041:211 | CH16COP |
| 1963 | 558762 | RTA22200022F.a.03.1.P.Seq | F | M00054867:22 | CH17COHLV |
| 1964 | 550818 | RTA22200020F.d.10.1.P.Seq | F | M00054590:72 | CH17COHLV |
| 1965 | 554079 | RTA22200021F.p.09.2.P.Seq | F | M00054862:27 | CH17COHLV |
| 1966 | 452430 | RTA22200016F.e.07.1.P.Seq | F | M00057192:52 | CH16COP |
| 1967 | 452430 | RTA22200008F.e.11.1.P.Seq | F | M00056342:611 | CH15CON |
| 1968 | 556082 | RTA22200019F.i.02.1.P.Seq | F | M00064507:311 | CH17COHLV |
| 1969 | 514418 | RTA22200023F.e.23.1.P.Seq | F | M00055046:511 | CH17COHLV |
| 1970 | 426895 | RTA22200021F.p.14.2.P.Seq | F | M00054863:73 | CH17COHLV |
| 1971 | 560803 | RTA22200025F.c.05.1.P.Seq | F | M00055283:65 | CH17COHLV |
| 1972 | 447737 | RTA22200018F.c.11.1.P.Seq | F | M00042453:51 | CH17COHLV |
| 1973 | 373432 | RTA22200018F.l.18.1.P.Seq | F | M00043350:89 | CH17COHLV |
| 1974 | 779 | RTA22200250F.f.02.1.P.Seq | F | M00027820:32 | CH04MAL |
| 1975 | 455327 | RTA22200015F.m.05.1.P.Seq | F | M00057124:410 | CH16COP |
| 1976 | 554742 | RTA22200004F.k.16.1.P.Seq | F | M00055806:812 | CH15CON |
| 1977 | 455327 | RTA22200022F.g.14.1.P.Seq | F | M00054933:47 | CH17COHLV |
| 1978 | 11043 | RTA22200228F.j.10.2.P.Seq | F | M00006861:18 | CH02COH |
| 1979 | 727447 | RTA22200012F.c.14.1.P.Seq | F | M00056684:15 | CH16COP |
| 1980 | 552905 | RTA22200011F.i.16.1.P.Seq | F | M00056597:67 | CH16COP |
| 1981 | 446900 | RTA22200001F.g.23.1.P.Seq | F | M00042711:711 | CH15CON |
| 1982 | 644190 | RTA22200005F.j.02.1.P.Seq | F | M00055913:45 | CH15CON |
| 1983 | 455327 | RTA22200021F.c.18.2.P.Seq | F | M00054739:73 | CH17COHLV |
| 1984 | 422375 | RTA22200020F.g.01.1.P.Seq | F | M00054613:49 | CH17COHLV |
| 1985 | 422375 | RTA22200020F.f.24.1.P.Seq | F | M00054613:49 | CH17COHLV |
| 1986 | 530774 | RTA22200025F.p.22.2.P.Seq | F | M00055405:49 | CH17COHLV |
| 1987 | 554101 | RTA22200012F.g.10.1.P.Seq | F | M00056711:65 | CH16COP |
| 1988 | 5268 | RTA22200226F.g.10.1.P.Seq | F | M00005650:44 | CH02COH |
| 1989 | 642461 | RTA22200012F.g.18.1.P.Seq | F | M00056715:71 | CH16COP |
| 1990 | 770 | RTA22200003F.a.18.1.P.Seq | F | M00055575:48 | CH15CON |
| 1991 | 3837 | RTA22200231F.b.24.1.P.Seq | F | M00007936:29 | CH03MAH |
| 1992 | 561382 | RTA22200022F.d.20.1.P.Seq | F | M00054899:71 | CH17COHLV |
| 1993 | 4408 | RTA22200248F.e.13.1.P.Seq | F | M00027543:29 | CH04MAL |
| 1994 | 5686 | RTA22200234F.j.21.1.P.Seq | F | M00022279:84 | CH03MAH |
| 1995 | 374609 | RTA22200013F.e.23.1.P.Seq | F | M00056833:31 | CH16C0P |
| 1996 | 734793 | RTA22200012F.h.06.1.P.Seq | F | M00056719:46 | CH16COP |
| 1997 | 452430 | RTA2220O014F.f.18.2.P.Seq | F | M00056964:12 | CH16COP |
| 1998 | 450940 | RTA22200020F.n.11.1.P.Seq | F | M00054684:812 | CH17COHLV |
| 1999 | 460445 | RTA22200024F.c.23.1.P.Seq | F | M00055162:66 | CH17COHLV |
| 2000 | 549041 | RTA22200020F.i.01.1.P.Seq | F | M00054636:23 | CH17COHLV |
| 2001 | 555276 | RTA22200018F.g.13.1.P.Seq | F | M00043313:77 | CH17COHLV |
| 2002 | 426895 | RTA22200015F.l.18.1.P.Seq | F | M00057120:512 | CH16COP |
| 2003 | 1833 | RTA22200224F.f.16.1.P.Seq | F | M00005293:46 | CH02COH |
| 2004 | 446450 | RTA22200009F.h.08.1.P.Seq | F | M00042805:56 | CH16COP |
| 2005 | 650517 | RTA22200007F.l.18.2.P.Seq | F | M00056248:19 | CH15CON |
| 2006 | 554785 | RTA22200026F.f.14.1.P.Seq | F | M00055479:312 | CH17COHLV |
| 2007 | 607430 | RTA22200002F.i.06.1.P.Seq | F | M00055508:53 | CH15CON |
| 2008 | 446673 | RTA22200012F.a.18.1.P.Seq | F | M00056665:55 | CH16COP |
| 2009 | 734685 | RTA22200014F.i.17.2.P.Seq | F | M00056986:71 | CH16COP |
| 2010 | 11630 | RTA22200248F.h.02.1.P.Seq | F | M00027562:32 | CH04MAL |
| 2011 | 2930 | RTA22200228F.c.13.1.P.Seq | F | M00006795:47 | CH02COH |
| 2012 | 44424 | RTA22200006F.f.07.2.P.Seq | F | M00056038:64 | CH15CON |
| 2013 | 452052 | RTA22200001F.e.19.1.P.Seq | F | M00042574:88 | CH15CON |
| 2014 | 449356 | RTA22200009F.j.14.2.P.Seq | F | M00042826:35 | CH16COP |
| 2015 | 726225 | RTA22200010F.d.04.1.P.Seq | F | M00056372:310 | CH16COP |
| 2016 | 453708 | RTA22200022F.j.14.1.P.Seq | F | M00054950:76 | CH17COHLV |
| 2017 | 447858 | RTA22200003F.n.20.1.P.Seq | F | M00055720:79 | CH15CON |
| 2018 | 451613 | RTA22200018F.e.18.1.P.Seq | F | M00043301:89 | CH17COHLV |
| 2019 | 650337 | RTA22200008F.c.18.1.P.Seq | F | M00056319:71 | CH15CON |
| 2020 | 62016 | RTA22200019F.k.10.1.P.Seq | F | M00054522:811 | CH17COHLV |
| 2021 | 447250 | RTA22200014F.f.02.2.P.Seq | F | M00056960:35 | CH16COP |
| 2022 | 3837 | RTA22200231F.c.01.1.P.Seq | F | M00007936:29 | CH03MAH |
| 2023 | 640614 | RTA22200017F.e.22.1.P.Seq | F | M00057340:312 | CH16COP |
| 2024 | 729531 | RTA22200013F.g.24.1.P.Seq | F | M00056850:511 | CH16COP |
| 2025 | 729531 | RTA22200013F.h.01.1.P.Seq | F | M00056850:511 | CH16COP |
| 2026 | 647952 | RTA22200004F.j.07.1.P.Seq | F | M00055800:38 | CH15CON |
| 2027 | 446913 | RTA22200004F.k.19.1.P.Seq | F | M00055806:67 | CH15CON |
| 2028 | 2675 | RTA22200233F.a.20.1.P.Seq | F | M00008015:68 | CH03MAH |
| 2029 | 643481 | RTA22200003F.i.13.1.P.Seq | F | M00055664:18 | CH15CON |
| 2030 | 1345 | RTA22200012F.l.22.1.P.Seq | F | M00056754:84 | CH16COP |
| 2031 | 26 | RTA22200231F.a.03.1.P.Seq | F | M00007926:15 | CH03MAH |
| 2032 | 945 | RTA22200230F.h.02.1.P.Seq | F | M00007156:56 | CH02COH |
| 2033 | 449169 | RTA22200009F.b.09.2.P.Seq | F | M00042461:110 | CH16COP |
| 2034 | 394193 | RTA22200007F.h.10.1.P.Seq | F | M00056209:612 | CH15CON |
| 2035 | 452212 | RTA22200006F.h.13.2.P.Seq | F | M00056055:21 | CH15CON |
| 2036 | 394193 | RTA22200007F.i.15.2.P.Seq | F | M00056220:42 | CH15CON |
| 2037 | 1310 | RTA22200235F.o.10.2.P.Seq | F | M00022561:16 | CH03MAH |
| 2038 | 734094 | RTA22200016F.k.07.1.P.Seq | F | M00057241:24 | CH16COP |
| 2039 | 646579 | RTA22200002F.h.08.1.P.Seq | F | M00055498:89 | CH15CON |
| 2040 | 4471 | RTA22200233F.j.22.1.P.Seq | F | M00008098:81 | CH03MAH |
| 2041 | 729173 | RTA22200016F.e.13.1.P.Seq | F | M00057196:53 | CH16COP |
| 2042 | 450323 | RTA22200009F.i.11.2.P.Seq | F | M00042814:211 | CH16COP |
| 2043 | 4652 | RTA22200241F.n.17.1.P.Seq | F | M00026950:612 | CH04MAL |
| 2044 | 553316 | RTA00022201F.a.10.2.P.Seq | F | M00054722:38 | CH17COHLV |
| 2045 | 642604 | RTA22200016F.j.10.1.P.Seq | F | M00057233:67 | CH16COP |
| 2046 | 553316 | RTA22200002F.i.02.1.P.Seq | F | M00055504:48 | CH15CON |
| 2047 | 4097 | RTA22200249F.f.14.1.P.Seq | F | M00027652:73 | CH04MAL |
| 2048 | 6818 | RTA22200006F.f.12.2.P.Seq | F | M00056042:11 | CH15CON |
| 2049 | 395341 | RTA22200024F.c.22.1.P.Seq | F | M00055161:111 | CH17COHLV |
| 2050 | 649143 | RTA22200007F.o.20.1.P.Seq | F | M00056282:31 | CH15CON |
| 2051 | 649143 | RTA22200007F.o.18.1.P.Seq | F | M00056282:611 | CH15CON |
| 2052 | 648310 | RTA22200007F.e.16.1.P.Seq | F | M00056184:61 | CH15CON |
| 2053 | 447574 | RTA22200014F.k.20.1.P.Seq | F | M00057002:25 | CH16COP |
| 2054 | 648931 | RTA22200004F.b.12.1.P.Seq | F | M00055744:68 | CH15CON |
| 2055 | 6878 | RTA22200231F.a.01.1.P.Seq | F | M00007926:17 | CH03MAH |
| 2056 | 452238 | RTA22200009F.d.09.2.P.Seq | F | M00042758:812 | CH16COP |
| 2057 | 1870 | RTA22200238F.g.09.1.P.Seq | F | M00022911:71 | CH05MAH |
| 2058 | 559259 | RTA22200002F.n.12.1.P.Seq | F | M00055545:812 | CH15CON |
| 2059 | 453457 | RTA22200004F.a.06.1.P.Seq | F | M00055735:37 | CH15CON |
| 2060 | 8868 | RTA22200233F.l.13.1.P.Seq | F | M00021626:64 | CH03MAH |
| 2061 | 453059 | RTA22200001F.b.21.1.P.Seq | F | M00042540:63 | CH15CON |
| 2062 | 236368 | RTA22200008F.d.09.1.P.Seq | F | M00056323:17 | CH15CON |
| 2063 | 453059 | RTA22200001F.b.18.1.P.Seq | F | M00042539:55 | CH15CON |
| 2064 | 549979 | RTA22200007F.c.06.1.P.Seq | F | M00056153:41 | CH15CON |
| 2065 | 515631 | RTA22200014F.j.22.2.P.Seq | F | M00056996:112 | CH16COP |
| 2066 | 2235 | RTA22200234F.f.22.1.P.Seq | F | M00022236:12 | CH03MAH |
| 2067 | 448193 | RTA22200016F.n.15.1.P.Seq | F | M00057271:51 | CH16COP |
| 2068 | 530774 | RTA22200010F.c.12.1.P.Seq | F | M00056368:64 | CH16COP |
| 2069 | 650204 | RTA22200002F.d.14.1.P.Seq | F | M00055450:28 | CH15CON |
| 2070 | 644240 | RTA22200005F.j.19.1.P.Seq | F | M00055921:53 | CH15CON |
| 2071 | 552614 | RTA22200022F.l.11.1.P.Seq | F | M00054965:82 | CH17COHLV |
| 2072 | 727331 | RTA22200011F.b.04.1.P.Seq | F | M00056532:76 | CH16COP |
| 2073 | 185457 | RTA22200244F.n.05.1.P.Seq | F | M00027220:212 | CH04MAL |
| 2074 | 454531 | RTA22200022F.a.11.1.P.Seq | F | M00054869:41 | CH17COHLV |
| 2075 | 643485 | RTA22200006F.g.19.2.P.Seq | F | M00056050:13 | CH15CON |
| 2076 | 733669 | RTA22200013F.m.22.1.P.Seq | F | M00056895:17 | CH16COP |
| 2077 | 452344 | RTA22200016F.b.19.1.P.Seq | F | M00057167:27 | CH16COP |
| 2078 | 63602 | RTA22200002F.b.11.1.P.Seq | F | M00055431:59 | CH15CON |
| 2079 | 454155 | RTA22200004F.j.13.1.P.Seq | F | M00055802:48 | CH15CON |
| 2080 | 549903 | RTA22200013F.b.22.1.P.Seq | F | M00056811:34 | CH16COP |
| 2081 | 515631 | RTA22200014F.j.22.1.P.Seq | F | M00056996:112 | CH16COP |
| 2082 | 6878 | RTA22200248F.j.20.1.P.Seq | F | M00027580:510 | CH04MAL |
| 2083 | 2977 | RTA22200231F.l.18.1.P.Seq | F | M00007983:86 | CH03MAH |
| 2084 | 553823 | RTA22200006F.i.02.2.P.Seq | F | M00056060:210 | CH15CON |
| 2085 | 3070 | RTA22200026F.a.07.1.P.Seq | F | M00055405:77 | CH17COHLV |
| 2086 | 728884 | RTA22200012F.k.06.1.P.Seq | F | M00056740:25 | CH16COP |
| 2087 | 8166 | RTA22200009F.c.03.2.P.Seq | F | M00042469:84 | CH16COP |
| 2088 | 644190 | RTA22200010F.b.18.1.P.Seq | F | M00056362:75 | CH16COP |
| 2089 | 733669 | RTA22200015F.l.05.1.P.Seq | F | M00057117:711 | CH16COP |
| 2090 | 728273 | RTA22200011F.i.07.1.P.Seq | F | M00056595:12 | CH16COP |
| 2091 | 406499 | RTA22200004F.a.13.1.P.Seq | F | M00055736:77 | CH15CON |
| 2092 | 557720 | RTA22200022F.k.07.1.P.Seq | F | M00054954:61 | CH17COHLV |
| 2093 | 732050 | RTA22200015F.d.10.1.P.Seq | F | M00057065:44 | CH16COP |
| 2094 | 450867 | RTA22200020F.j.18.1.P.Seq | F | M00054648:810 | CH17COHLV |
| 2095 | 650297 | RTA22200016F.a.01.1.P.Seq | F | M00057151:24 | CH16COP |
| 2096 | 448064 | RTA22200009F.f.08.1.P.Seq | F | M00042781:16 | CH16COP |
| 2097 | 452530 | RTA22200018F.p.03.1.P.Seq | F | M00043374:26 | CH17COHLV |
| 2098 | 7592 | RTA22200225F.m.10.1.P.Seq | F | M00005515:84 | CH02COH |
| 2099 | 733669 | RTA22200016F.b.13.1.P.Seq | F | M00057165:512 | CH16COP |
| 2100 | 11028 | RTA22200228F.d.13.1.P.Seq | F | M00006806:39 | CH02COH |
| 2101 | 1013 | RTA22200001F.h.22.1.P.Seq | F | M00042720:710 | CH15CON |
| 2102 | 549265 | RTA22200002F.h.03.1.P.Seq | F | M00055496:39 | CH15CON |
| 2103 | 376600 | RTA22200013F.p.08.1.P.Seq | F | M00056911:62 | CH16COP |
| 2104 | 643804 | RTA22200004F.p.14.1.P.Seq | F | M00055839:110 | CH15CON |
| 2105 | 454927 | RTA22200026F.d.08.1.P.Seq | F | M00055420:610 | CH17COHLV |
| 2106 | 446528 | RTA22200006F.i.06.2.P.Seq | F | M00056061:66 | CH15CON |
| 2107 | 2218 | RTA22200226F.n.14.1.P.Seq | F | M00005800:411 | CH02COH |
| 2108 | 452704 | RTA22200004F.a.01.1.P.Seq | F | M00055733:711 | CH15CON |
| 2109 | 84895 | RTA22200014F.m.13.2.P.Seq | F | M00057013:41 | CH16COP |
| 2110 | 157629 | RTA22200242F.c.11.1.P.Seq | F | M00026984:410 | CH04MAL |
| 2111 | 2930 | RTA22200229F.h.22.1.P.Seq | F | M00006990:52 | CH02COH |
| 2112 | 7037 | RTA22200230F.k.08.1.P.Seq | F | M00007194:24 | CH02COH |
| 2113 | 559806 | RTA22200002F.i.04.1.P.Seq | F | M00055505:110 | CH15CON |
| 2114 | 452076 | RTA22200004F.g.03.1.P.Seq | F | M00055783:311 | CH15CON |
| 2115 | 454869 | RTA22200004F.e.14.1.P.Seq | F | M00055771:44 | CH15CON |
| 2116 | 559674 | RTA22200023F.j.05.1.P.Seq | F | M00055071:12 | CH17COHLV |
| 2117 | 2235 | RTA22200232F.n.21.1.P.Seq | F | M00022149:31 | CH03MAH |
| 2118 | 7545 | RTA22200222F.k.06.1.P.Seq | F | M00004054:75 | CH01COH |
| 2119 | 729173 | RTA22200016F.n.22.1.P.Seq | F | M00057272:11 | CH16COP |
| 2120 | 650448 | RTA22200004F.m.09.1.P.Seq | F | M00055818:612 | CH15CON |
| 2121 | 172013 | RTA22200002F.j.16.1.P.Seq | F | M00055520:16 | CH15CON |
| 2122 | 651088 | RTA22200014F.c.15.1.P.Seq | F | M00056945:211 | CH16COP |
| 2123 | 651088 | RTA22200014F.c.15.2.P.Seq | F | M00056945:211 | CH16COP |
| 2124 | 726810 | RTA22200015F.o.06.1.P.Seq | F | M00057136:61 | CH16COP |
| 2125 | 406499 | RTA22200004F.n.23.1.P.Seq | F | M00055827:12 | CH15CON |
| 2126 | 556325 | RTA22200023F.l.03.1.P.Seq | F | M00055087:110 | CH17COHLV1 |
| 2127 | 644836 | RTA22200004F.i.13.1.P.Seq | F | M00055797:48 | CH15CON |
| 2128 | 649062 | RTA22200007F.d.04.1.P.Seq | F | M00056162:59 | CH15CON |
| 2129 | 454776 | RTA22200011F.d.07.1.P.Seq | F | M00056551:62 | CH16COP |
| 2130 | 377579 | RTA22200025F.f.17.1.P.Seq | F | M00055332:711 | CH17COHLV |
| 2131 | 728131 | RTA22200014F.o.08.1.P.Seq | F | M00057024:75 | CH16COP |
| 2132 | 475203 | RTA22200016F.a.05.1.P.Seq | F | M00057154:24 | CH16COP |
| 2133 | 727314 | RTA22200011F.p.15.1.P.Seq | F | M00056659:78 | CH16COP |
| 2134 | 552025 | RTA22200019F.k.15.1.P.Seq | F | M00054523:110 | CH17COHLV |
| 2135 | 561382 | RTA22200004F.d.11.1.P.Seq | F | M00055765:25 | CH15CON |
| 2136 | 732579 | RTA22200017F.a.22.1.P.Seq | F | M00057300:62 | CH16COP |
| 2137 | 167 | RTA22200012F.o.22.1.P.Seq | F | M00056779:512 | CH16COP |
| 2138 | 185585 | RTA22200241F.l.21.1.P.Seq | F | M00026937:28 | CH04MAL |
| 2139 | 728131 | RTA22200014F.o.08.2.P.Seq | F | M00057024:75 | CH16COP |
| 2140 | 475203 | RTA22200014F.m.07.2.P.Seq | F | M00057011:43 | CH16COP |
| 2141 | 724616 | RTA22200011F.l.16.1.P.Seq | F | M00056622:33 | CH16COP |
| 2142 | 726594 | RTA22200015F.d.13.1.P.Seq | F | M00057066:14 | CH16COP |
| 2143 | 645222 | RTA22200008F.a.16.1.P.Seq | F | M00056300:15 | CH15CON |
| 2144 | 400362 | RTA22200024F.j.22.1.P.Seq | F | M00055222:85 | CH17COHLV |
| 2145 | 646583 | RTA22200009F.m.15.1.P.Seq | F | M00042850:310 | CH16COP |
| 2146 | 475203 | RTA22200014F.m.07.1.P.Seq | F | M00057011:43 | CH16COP |
| 2147 | 550001 | RTA22200002F.e.03.1.P.Seq | F | M00055454:17 | CH15CON |
| 2148 | 640703 | RTA22200002F.i.19.1.P.Seq | F | M00055512:47 | CH15CON |
| 2149 | 646583 | RTA22200007F.k.10.2.P.Seq | F | M00056236:71 | CH15CON |
| 2150 | 449468 | RTA22200014F.l.23.1.P.Seq | F | M00057008:59 | CH16COP |
| 2151 | 449468 | RTA22200016F.h.22.1.P.Seq | F | M00057223:36 | CH16COP |
| 2152 | 551628 | RTA22200001F.l.16.1.P.Seq | F | M00042891:34 | CH15CON |
| 2153 | 449468 | RTA22200014F.l.23.2.P.Seq | F | M00057008:59 | CH16COP |
| 2154 | 417259 | RTA22200021F.i.19.3.P.Seq | F | M00054804:812 | CH17COHLV |
| 2155 | 448029 | RTA22200009F.n.10.1.P.Seq | F | M00042856:67 | CH15COP |
| 2156 | 524363 | RTA22200024F.h.07.1.P.Seq | F | M00055201:13 | CH17COHLV |
| 2157 | 446531 | RTA22200023F.n.24.1.P.Seq | F | M00055116:22 | CH17COHLV |
| 2158 | 561359 | RTA22200008F.a.11.1.P.Seq | F | M00056295:67 | CH15CON |
| 2159 | 711297 | RTA22200007F.f.10.1.P.Seq | F | M00056190:72 | CH15CON |
| 2160 | 650097 | RTA22200015F.g.20.1.P.Seq | F | M00057088:32 | CH16COP |
| 2161 | 495715 | RTA22200021F.m.16.2.P.Seq | F | M00054839:22 | CH17COHLV |
| 2162 | 734685 | RTA22200014F.i.17.1.P.Seq | F | M00056986:71 | CH16COP |
| 2163 | 560515 | RTA22200023F.g.10.1.P.Seq | F | M00055054:32 | CH17COHLV |
| 2164 | 3441 | RTA22200235F.l.18.2.P.Seq | F | M00022537:311 | CH03MAH |
| 2165 | 729273 | RTA22200016F.i.03.1.P.Seq | F | M00057224:310 | CH16COP |
| 2166 | 557039 | RTA22200004F.g.15.1.P.Seq | F | M00055786:45 | CH15CON |
| 2167 | 711297 | RTA22200015F.k.22.1.P.Seq | F | M00057114:210 | CH16COP |
| 2168 | 711297 | RTA22200014F.g.08.2.P.Seq | F | M00056967:42 | CH16COP |
| 2169 | 2860 | RTA22200012F.i.07.1.P.Seq | F | M00056726:75 | CH16COP |
| 2170 | 558534 | RTA22200020F.l.05.1.P.Seq | F | M00054665:511 | CH17COHLV |
| 2171 | 711297 | RTA22200014F.g.08.1.P.Seq | F | M00056967:42 | CH16COP |
| 2172 | 378457 | RTA22200025F.g.08.1.P.Seq | F | M00055338:87 | CH17COHLV |
| 2173 | 646583 | RTA22200007F.n.04.1.P.Seq | F | M00056263:31 | CH15CON |
| 2174 | 646583 | RTA22200006F.p.06.2.P.Seq | F | M00056128:210 | CH15CON |
| 2175 | 1996 | RTA22200012F.m.23.1.P.Seq | F | M00056762:55 | CH16COP |
| 2176 | 7962 | RTA22200235F.d.18.1.P.Seq | F | M00022452:27 | CH03MAH |
| 2177 | 645139 | RTA22200013F.n.18.1.P.Seq | F | M00056902:812 | CH16COP |
| 2178 | 449468 | RTA22200018F.g.12.1.P.Seq | F | M00043313:13 | CH17COHLV |
| 2179 | 9898 | RTA22200238F.f.06.1.P.Seq | F | M00022902:810 | CH03MAH |
| 2180 | 406499 | RTA22200004F.i.15.1.P.Seq | F | M00055797:57 | CH15CON |
| 2181 | 1257 | RTA22200230F.h.06.1.P.Seq | F | M00007156.68 | CH02COH |
| 2182 | 549903 | RTA22200004F.g.12.1.P.Seq | F | M00055785:58 | CH15CON |
| 2183 | 557906 | RTA22200004F.j.22.1.P.Seq | F | M00055803:48 | CH15CON |
| 2184 | 3538 | RTA22200222F.c.09.1.P.Seq | F | M00001491:38 | CH01COH |
| 2185 | 3114 | RTA22200231F.n.12.1.P.Seq | F | M00007994:311 | CH03MAH |
| 2186 | 426895 | RTA22200018F.l.24.1.P.Seq | F | M00043352:25 | CH17COHLV |
| 2187 | 923 | RTA22200015F.c.15.1.P.Seq | F | M00057060:112 | CH16COP |
| 2188 | 645194 | RTA22200007F.h.17.1.P.Seq | F | M00056212:71 | CH15C0N |
| 2189 | 550161 | RTA22200014F.a.06.1.P.Seq | F | M00056921:37 | CH16COP |
| 2190 | 650119 | RTA22200005F.d.21.1.P.Seq | F | M00055874:43 | CH15CON |
| 2191 | 642142 | RTA22200016F.g.21.1.P.Seq | F | M00057217:27 | CH16COP |
| 2192 | 419255 | RTA22200004F.l.20.1.P.Seq | F | M00055814:411 | CH15CON |
| 2193 | 552905 | RTA22200019F.j.20.1.P.Seq | F | M00054518:43 | CH17COHLV |
| 2194 | 511997 | RTA22200005F.b.22.1.P.Seq | F | M00055860:18 | CH15CON |
| 2195 | 551434 | RTA22200003F.m.02.1.P.Seq | F | M00055701:410 | CH15CON |
| 2196 | 727447 | RTA22200012F.m.18.1.P.Seq | F | M00056759:73 | CH16COP |
| 2197 | 378786 | RTA22200025F.o.11.2.P.Seq | F | M00055396:77 | CH17COHLV |
| 2198 | 649152 | RTA22200006F.p.11.2.P.Seq | F | M00056131:312 | CH15CON |
| 2199 | 18853 | RTA22200023F.p.10.1.P.Seq | F | M00055134:53 | CH17COHLV |
| 2200 | 643481 | RTA22200005F.f.05.1.P.Seq | F | M00055884:510 | CH15CON |
| 2201 | 644417 | RTA22200004F.p.08.1.P.Seq | F | M00055838:712 | CH15CON |
| 2202 | 726788 | RTA22200011F.i.17.1.P.Seq | F | M00056597:32 | CH16COP |
| 2203 | 206 | RTA22200248F.m.13.1.P.Seq | F | M00027594:33 | CH04MAL |
| 2204 | 395930 | RTA22200011F.c.20.1.P.Seq | F | M00056548:311 | CH16COP |
| 2205 | 185589 | RTA22200244F.a.15.1.P.Seq | F | M00027168:810 | CH04MAL |
| 2206 | 1441 | RTA22200225F.i.15.1.P.Seq | F | M00005485:25 | CH02COH |
| 2207 | 14522 | RTA22200241F.h.19.1.P.Seq | F | M00026909:73 | CH04MAL |
| 2208 | 203605 | RTA22200013F.n.02.1.P.Seq | F | M00056896:65 | CH16COP |
| 2209 | 551527 | RTA22200019F.g.15.1.P.Seq | F | M00054496:29 | CH17COHLV |
| 2210 | 4509 | RTA22200225F.m.07.1.P.Seq | F | M00005514:16 | CH02COH |
| 2211 | 447737 | RTA22200001F.g.12.1.P.Seq | F | M00042704:69 | CH15CON |
| 2212 | 447388 | RTA22200004F.k.08.1.P.Seq | F | M00055804:61 | CH15CON |
| 2213 | 451932 | RTA22200002F.c.24.1.P.Seq | F | M00055447:84 | CH15CON |
| 2214 | 559043 | RTA22200025F.c.20.1.P.Seq | F | M00055294:44 | CH17COHLV |
| 2215 | 380634 | RTA22200021F.n.06.2.P.Seq | F | M00054842:311 | CH17COH |
| 2216 | 495715 | RTA22200018F.p.18.1.P.Seq | F | M00043379:37 | CH17COHLV |
| 2217 | 451932 | RTA22200002F.d.01.1.P.Seq | F | M00055447:84 | CH15CON |
| 2218 | 447939 | RTA22200002F.d.12.1.P.Seq | F | M00055450:79 | CH15CON |
| 2219 | 1181 | RTA22200250F.c.03.1.P.Seq | F | M00027781:54 | CH04MAL |
| 2220 | 376600 | RTA22200017F.a.O6.1.P.Seq | F | M00057288:58 | CH16COP |
| 2221 | 234761 | RTA22200001F.j.10.1.P.Seq | F | M00042739:41 | CH15CON |
| 2222 | 644417 | RTA22200014F.d.20.1.P.Seq | F | M00056952:16 | CH16COP |
| 2223 | 639048 | RTA22200004F.c.05.1.P.Seq | F | M00055749:811 | CH15CON |
| 2224 | 11452 | RTA22200226F.d.16.1.P.Seq | F | M00005628:310 | CH02COH |
| 2225 | 452076 | RTA22200001F.c.17.1.P.Seq | F | M00042551:49 | CH15CON |
| 2226 | 644523 | RTA22200005F.c.07.1.P.Seq | F | M00055864:82 | CH15CON |
| 2227 | 554678 | RTA22200021F.h.11.3.P.Seq | F | M00054776:61 | CH17COHLV |
| 2228 | 3550 | RTA22200236F.k.16.1.P.Seq | F | M00022656:511 | CH03MAH |
| 2229 | 450311 | RTA22200007F.d.12.1.P.Seq | F | M00056167:28 | CH15CON |
| 2230 | 647280 | RTA22200005F.o.13.1.P.Seq | F | M00055976:61 | CH15CON |
| 2231 | 548858 | RTA22200026F.f.18.1.P.Seq | F | M00055480:810 | CH17COHLV |
| 2232 | 4204 | RTA22200225F.p.22.1.P.Seq | F | M00005568:29 | CH02COH |
| 2233 | 540690 | RTA22200011F.f.19.1.P.Seq | F | M00056574:17 | CH16COP |
| 2234 | 404774 | RTA22200009F.k.06.2.P.Seq | F | M00042833:71 | CH16COP |
| 2235 | 557823 | RTA22200023F.h.01.1.P.Seq | F | M00055057:63 | CH17COHLV |
| 2236 | 1458 | RTA22200242F.g.04.1.P.Seq | F | M00027014:74 | CH04MAL |
| 2237 | 485431 | RTA22200020F.e.01.1.P.Seq | F | M00054595:89 | CH17COHLV |
| 2238 | 2245 | RTA22200229F.l.11.1.P.Seq | F | M00007032:69 | CH02COH |
| 2239 | 3242 | RTA22200226F.p.09.1.P.Seq | F | M00005826:710 | CH02COH |
| 2240 | 648747 | RTA22200007F.m.12.1.P.Seq | F | M00056254:82 | CH15CON |
| 2241 | 3805 | RTA22200222F.c.01.1.P.Seq | F | M00001470:71 | CH01COH |
| 2242 | 475203 | RTA22200012F.c.17.1.P.Seq | F | M00056688:65 | CH16COP |
| 2243 | 12018 | RTA22200240F.h.11.1.P.Seq | F | M00023399:38 | CH04MAL |
| 2244 | 475203 | RTA22200009F.i.18.2.P.Seq | F | M00042818:512 | CH16COP |
| 2245 | 3805 | RTA22200222F.b.24.1.P.Seq | F | M00001470:71 | CH01COH |
| 2246 | 496132 | RTA22200018F.e.23.1.P.Seq | F | M00043304:41 | CH17COHLV |
| 2247 | 650600 | RTA22200005F.m.01.1.P.Seq | F | M00055941:212 | CH15CON |
| 2248 | 650749 | RTA22200004F.g.10.1.P.Seq | F | M00055785:63 | CH15CON |
| 2249 | 223148 | RTA22200023F.n.05.1.P.Seq | F | M00055106:47 | CH17COHLV |
| 2250 | 449 | RTA22200018F.m.12.1.P.Seq | F | M00043355:811 | CH17COHLV |
| 2251 | 735620 | RTA22200013F.g.07.1.P.Seq | F | M00056843:89 | CH16COP |
| 2252 | 650600 | RTA22200005F.l.24.1.P.Seq | F | M00055941:212 | CH15CON |
| 2253 | 218 | RTA22200021F.m.03.2.P.Seq | F | M00054832:59 | CH17COHLV |
| 2254 | 4161 | RTA22200222F.d.07.1.P.Seq | F | M00001561:71 | CH01COH |
| 2255 | 373202 | RTA22200025F.f.01.1.P.Seq | F | M00055322:51 | CH17COHLV |
| 2256 | 724339 | RTA22200010F.l.14.1.P.Seq | F | M00056490:52 | CH16COP |
| 2257 | 133291 | RTA22200007F.p.17.1.P.Seq | F | M00056290:65 | CH15CON |
| 2258 | 736753 | RTA22200016F.f.22.1.P.Seq | F | M00057208:48 | CH16C0P |
| 2259 | 650600 | RTA22200003F.m.18.1.P.Seq | F | M00055706:11 | CH15CON |
| 2260 | 451569 | RTA22200013F.l.03.1.P.Seq | F | M00056879:12 | CH16COP |
| 2261 | 1297 | RTA22200233F.n.06.1.P.Seq | F | M00021655:82 | CH03MAH |
| 2262 | 3680 | RTA22200241F.h.12.1.P.Seq | F | M00026906:310 | CH01MAL |
| 2263 | 63602 | RTA22200005F.g.11.1.P.Seq | F | M00055888:25 | CH15CON |
| 2264 | 2757 | RTA22200238F.l.07.1.P.Seq | F | M00022973:77 | CH03MAH |
| 2265 | 373128 | RTA22200020F.a.11.1.P.Seq | F | M00054569:87 | CH17COHLV |
| 2266 | 641479 | RTA22200014F.l.16.2.P.Seq | F | M00057007:212 | CH16COP |
| 2267 | 450380 | RTA22200015F.b.12.1.P.Seq | F | M00057049:85 | CH16COP |
| 2268 | 133512 | RTA22200024F.i.12.1.P.Seq | F | M00055209:18 | CH17COHLV |
| 2269 | 447211 | RTA22200006F.b.19.2.P.Seq | F | M00056007:66 | CH15CON |
| 2270 | 645222 | RTA22200013F.a.24.1.P.Seq | F | M00056802:81 | CH16COP |
| 2271 | 645222 | RTA22200013F.b.01.1.P.Seq | F | M00056802:81 | CH16COP |
| 2272 | 17372 | RTA22200002F.i.22.1.P.Seq | F | M0055513:46 | CH15CON |
| 2273 | 451619 | RTA22200025F.m.23.2.P.Seq | F | M00055388:88 | CH17COHLV |
| 2274 | 2510 | RTA22200238F.m.21.1.P.Seq | F | M00022995:52 | CH03MAH |
| 2275 | 643974 | RTA22200007F.n.15.1.P.Seq | F | M00056268:24 | CH15CON |
| 2276 | 500630 | RTA22200013F.j.19.1.P.Seq | F | M00056872:16 | CH16COP |
| 2277 | 3101 | RTA22200225F.n.05.1.P.Seq | F | M00005530:17 | CH02COH |
| 2278 | 446938 | RTA22200004F.c.11.1.P.Seq | F | M00055751:41 | CH15CON |
| 2279 | 554469 | RTA22200013F.f.23.1.P.Seq | F | M00056841:79 | CH16COP |
| 2280 | 554469 | RTA222000O3F.n.24.1.P.Seq | F | M00055721:66 | CH15CON |
| 2281 | 2894 | RTA22200016F.b.05.1.P.Seq | F | M00057163:21 | CH16COP |
| 2282 | 650600 | RTA22200008F.e.04.1.P.Seq | F | M00056338:210 | CH15CON |
| 2283 | 3101 | RTA22200226F.j.12.1.P.Seq | F | M00005710:41 | CH02COH |
| 2284 | 554469 | RTA22200003F.o.01.1.P.Seq | F | M00055721:66 | CH15CON |
| 2285 | 9910 | RTA22200236F.n.06.1.P.Seq | F | M00022667:35 | CH03MAH |
| 2286 | 400608 | RTA22200008F.g.03.1.P.Seq | F | M00056460:711 | CH15CON |
| 2287 | 555051 | RTA22200021F.o.07.2.P.Seq | F | M00054854:58 | CH17COHLV |
| 2288 | 185400 | RTA22200002F.j.21.1.P.Seq | F | M00055522:57 | CH15CON |
| 2289 | 3059 | RTA22200233F.g.05.1.P.Seq | F | M00008075:112 | CH03MAH |
| 2290 | 647185 | RTA22200004F.b.20.1.P.Seq | F | M00055747:49 | CH15CON |
| 2291 | 1669 | RTA22200237F.p.19.1.P.Seq | F | M00022853:311 | CH03MAH |
| 2292 | 7158 | RTA22200232F.l.21.1.P.Seq | F | M00022129:512 | CH03MAH |
| 2293 | 496132 | RTA22200005F.d.06.1.P.Seq | F | M00055871:76 | CH15CON |
| 2294 | 378623 | RTA33300035F.k.20.1.P.Seq | F | M00055227:52 | CH17COHLV |
| 2295 | 1257 | RTA22200227F.i.05.1.P.Seq | F | M00006679:34 | CH02COH |
| 2296 | 648499 | RTA22200012F.d.21.1.P.Seq | F | M00056698:512 | CH16COP |
| 2297 | 185627 | RTA22200242F.k.21.1.P.Seq | F | M00027042:711 | CH04MAL |
| 2298 | 640005 | RTA22200008F.c.15.1.P.Seq | F | M00056312:33 | CH15CON |
| 2299 | 553462 | RTA22200021F.e.14.3.P.Seq | F | M00054750:412 | CH17COHLV |
| 2300 | 649852 | RTA22200002F.g.01.1.P.Seq | F | M00055470:71 | CH15CON |
| 2301 | 422375 | RTA22200018F.e.04.1.P.Seq | F | M00043296:210 | CH17COHLV |
| 2302 | 10910 | RTA22200227F.n.22.1.P.Seq | F | M00006745:42 | CH02COH |
| 2303 | 2737 | RTA22200023F.c.21.1.P.Seq | F | M00055034:71 | CH17COHLV |
| 2304 | 3438 | RTA22200225F.o.18.1.P.Seq | F | M00005548:12 | CH02COH |
| 2305 | 3438 | RTA22200228F.m.18.2.P.Seq | F | M00006885:711 | CH02COH |
| 2306 | 3763 | RTA22200225F.o.12.1.P.Seq | F | M00005546:72 | CH02COH |
| 2307 | 648966 | RTA22200007F.a.18.1.P.Seq | F | M00056141:29 | CH15C0N |
| 2308 | 724339 | RTA22200013F.m.10.1.P.Seq | F | M00056892:11 | CH16COP |
| 2309 | 451569 | RTA22200018F.l.17.1.P.Seq | F | M00043350:86 | CH17COHLV |
| 2310 | 554109 | RTA22200007F.d.17.1.P.Seq | F | M0056171:812 | CH15CON |
| 2311 | 380339 | RTA22200006F.h.10.2.P.Seq | F | M00056055:17 | CH15CON |
| 2312 | 729903 | RTA22200014F.g.06.1.P.Seq | F | M00056966:111 | CH16COP |
| 2313 | 45 | RTA22200025F.l.10.1.P.Seq | F | M00055379:38 | CH17COHLV |
| 2314 | 454653 | RTA22200019F.d.21.1.P.Seq | F | M00043503:55 | CH17COHLV |
| 2315 | 11536 | RTA22200237F.n.02.1.P.Seq | F | M00022828:36 | CH03MAH |
| 2316 | 373134 | RTA22200001F.h.02.1.P.Seq | F | M00042711:34 | CH15CON |
| 2317 | 185691 | RTA22200241F.g.04.1.P.Seq | F | M00026900:32 | CH04MAL |
| 2318 | 234761 | RTA22200011F.o.06.1.P.Seq | F | M00056646:75 | CH16COP |
| 2319 | 724339 | RTA22200012F.f.19.1.P.Seq | F | M00056710:31 | CH16COP |
| 2320 | 732740 | RTA22200016F.j.04.1.P.Seq | F | M00057231:19 | CH16COP |
| 2321 | 35895 | RTA22200017F.d.10.1.P.Seq | F | M00057325:310 | CH16COP |
| 2322 | 133512 | RTA22200018F.d.16.1.P.Seq | F | M00042517:67 | CH17COHLV |
| 2323 | 2974 | RTA22200227F.b.03.1.P.Seq | F | M00006590:310 | CH02COH |
| 2324 | 500 | RTA22200231F.l.13.1.P.Seq | F | M00007983:43 | CH03MAH |
| 2325 | 376919 | RTA22200020F.m.09.1.P.Seq | F | M00054678:57 | CH17COHLV |
| 2326 | 8403 | RTA22200233F.g.08.1.P.Seq | F | M00008076:62 | CH03MAH |
| 2327 | 3643 | RTA22200227F.e.11.1.P.Seq | F | M00006638:72 | CH02COH |
| 2328 | 447211 | RTA22200001F.j.13.1.P.Seq | F | M00042741:410 | CH15CON |
| 2329 | 447211 | RTA22200001F.b.15.1.P.Seq | F | M00042538:18 | CH15CON |
| 2330 | 14929 | RTA22200025F.i.20.1.P.Seq | F | M00055363:712 | CH17COHLV |
| 2331 | 648934 | RTA22200006F.k.14.2.P.Seq | F | M0005081:29 | CH15CON |
| 2332 | 731785 | RTA22200014F.j.11.2.P.Seq | F | M00056993:43 | CH16COP |
| 2333 | 639908 | RTA22200005F.g.08.1.P.Seq | F | M00055887:54 | CH15CON |
| 2334 | 344577 | RTA22200014F.m.20.1.P.Seq | F | M00057015:312 | CH16COP |
| 2335 | 2906 | RTA22200015F.m.13.1.P.Seq | F | M00057127:611 | CH16COP |
| 2336 | 446938 | RTA22200002F.c.18.1.P.Seq | F | M00055445:76 | CH15CON |
| 2337 | 2493 | RTA22200234F.h.08.1.P.Seq | F | M00022251:19 | CH03MAH |
| 2338 | 38 | RTA22200006F.o.08.2.P.Seq | F | M00056112:82 | CH15CON |
| 2339 | 13818 | RTA22200238F.e.13.1.P.Seq | F | M00022898:64 | CH03MAH |
| 2340 | 8371 | RTA22200229F.o.12.1.P.Seq | F | M00007065:611 | CH02COH |
| 2341 | 402494 | RTA22200012F.o.16.1.P.Seq | F | M00056776:16 | CH16COP |
| 2342 | 731785 | RTA22200014F.j.11.1.P.Seq | F | M00056993:43 | CH16COP |
| 2343 | 4621 | RTA22200235F.f.15.1.P.Seq | F | M00022468:510 | CH03MAH |
| 2344 | 9750 | RTA22200229F.g.23.1.P.Seq | F | M00006979:210 | CH02COH |
| 2345 | 133512 | RTA22200024F.p.23.1.P.Seq | F | M00055263:79 | CH17COHLV |
| 2346 | 162626 | RTA22200250F.f.03.1.P.Seq | F | M00027823:77 | CH04MAL |
| 2347 | 730059 | RTA22200011F.a.20.1.P.Seq | F | M00056530:41 | CH16COP |
| 2348 | 2069 | RTA22200224F.k.12.1.P.Seq | F | M00005373:86 | CH02COH |
| 2349 | 5868 | RTA22200242F.i.17.1.P.Seq | F | M00027030:38 | CH04MAL |
| 2350 | 2683 | RTA22200226F.o.08.1.P.Seq | F | M00005813:510 | CH02COH |
| 2351 | 380409 | RTA22200012F.h.07.1.P.Seq | F | M00056719:612 | CH16COP |
| 2352 | 639991 | RTA22200002F.k.20.1.P.Seq | F | M00055527:54 | CH15CON |
| 2353 | 535 | RTA22200233F.a.19.1.P.Seq | F | M00008015:210 | CH03MAH |
| 2354 | 14929 | RTA22200025F.f.21.1.P.Seq | F | M00055335:83 | CH17COHLV |
| 2355 | 134702 | RTA22200249F.n.23.1.P.Seq | F | M00027733:45 | CH04MAL |
| 2356 | 642477 | RTA22200004F.j.16.1.P.Seq | F | M00055802:612 | CH15CON |
| 2357 | 14929 | RTA22200014F.i.15.2.P.Seq | F | M00056986:611 | CH16COP |
| 2358 | 134702 | RTA22200241F.n.23.1.P.Seq | F | M00026951:76 | CH04MAL |
| 2359 | 185649 | RTA22200250F.g.08.1.P.Seq | F | M00027833:41 | CH04MAL |
| 2360 | 10702 | RTA22200241F.b.05.1.P.Seq | F | M00026860:51 | CH04MAL |
| 2361 | 643955 | RTA22200001F.k.21.1.P.Seq | F | M00042886:33 | CH15CON |
| 2362 | 643955 | RTA22200004F.p.19.1.P.Seq | F | M00055841:29 | CH15CON |
| 2363 | 4455 | RTA22200233F.o.08.1.P.Seq | F | M00021670:75 | CH03MAH |
| 2364 | 185567 | RTA22200242F.c.16.1.P.Seq | F | M00026985:25 | CH04MAL |
| 2365 | 9115 | RTA22200226F.e.04.1.P.Seq | F | M00005632:82 | CH02COH |
| 2366 | 14929 | RTA22200015F.i.12.1.P.Seq | F | M00057100:59 | CH16COP |
| 2367 | 14929 | RTA22200014F.i.15.1.P.Seq | F | M00056986:611 | CH16COP |
| 2368 | 4181 | RTA22200244F.k.18.1.P.Seq | F | M00027203:88 | CH04MAL |
| 2369 | 5206 | RTA22200238F.n.19.1.P.Seq | F | M00023002:710 | CH03MAH |
| 2370 | 825 | RTA22200237F.c.05.1.P.Seq | F | M00022702:24 | CH03MAH |
| 2371 | 825 | RTA22200238F.o.24.1.P.Seq | F | M00023020:79 | CH03MAH |
| 2372 | 825 | RTA22200231F.d.09.1.P.Seq | F | M00007943:32 | CH03MAH |
| 2373 | 2748 | RTA22200225F.d.18.1.P.Seq | F | M00005449:510 | CH02COH |
| 2374 | 2748 | RTA22200238F.i.02.1.P.Seq | F | M00022934:23 | CH03MAH |
| 2375 | 2748 | RTA22200225F.d.08.1.P.Seq | F | M00005445:12 | CH02COH |
| 2376 | 133512 | RTA22200014F.a.15.2.P.Seq | F | M00056923:59 | CH16COP |
| 2377 | 2748 | RTA22200237F.e.09.1.P.Seq | F | M00022719:612 | CH03MAH |
| 2378 | 642477 | RTA22200008F.e.02.1.P.Seq | F | M00056338:26 | CH15CON |
| 2379 | 642477 | RTA22200007F.n.16.1.P.Seq | F | M00056268:41 | CH15CON |
| 2380 | 2493 | RTA22200236F.f.17.1.P.Seq | F | M00022624:32 | CH03MAH |
| 2381 | 5796 | RTA22200235F.j.03.2.P.Seg | F | M00022508:32 | CH03MAH |
| 2382 | 3782 | RTA22200236F.k.02.1.P.Seq | F | M00022655:410 | CH03MAH |
| 2383 | 884 | RTA22200016F.b.01.1.P.Seq | F | M00057162:82 | CH16COP |
| 2384 | 5860 | RTA22200238F.p.04.1.P.Seq | F | M00023023:63 | CH03MAH |
| 2385 | 5275 | RTA22200226F.h.09.1.P.Seq | F | M00005675:72 | CH02COH |
| 2386 | 3932 | RTA22200233F.l.12.1.P.Seq | F | M00021626:34 | CH03MAH |
| 2387 | 884 | RTA22200017F.a.17.1.P.Seq | F | M00057297:63 | CH16COP |
| 2388 | 4455 | RTA22200235F.j.23.2.P.Seq | F | M00022517:53 | CH03MAH |
| 2389 | 5860 | RTA22200236F.c.15.1.P.Seq | F | M00022598:45 | CH03MAH |
| 2390 | 5860 | RTA22200232F.m.23.1.P.Seq | F | M00022143:310 | CH03MAH |
| 2391 | 372791 | RTA22200003F.o.02.1.P.Seq | F | M00055721:55 | CH15CON |
| 2392 | 5206 | RTA22200238F.o.14.1.P.Seq | F | M00023015:410 | CH03MAH |
| 2393 | 372791 | RTA22200005F.o.07.1.P.Seq | F | M00055973:44 | CH15CON |
| 2394 | 2846 | RTA22200228F.l.12.2.P.Seq | F | M00006873:512 | CH02COH |
| 2395 | 5275 | RTA22200225F.g.17.1.P.Seq | F | M00005469:17 | CH02COH |
| 2396 | 2846 | RTA22200228F.i.21.2.P.Seq | F | M00006852:37 | CH02COH |

[0296] TABLE 2B
Nearest Neighbor (BlastX vs. Non-Redundant Proteins)

| SEQ ID | ACCESSION | DESCRIPTION1 | P VALUE |
|---|---|---|---|
| 63 | 3236249 | (AC004684) hypothetical protein [Arabidopsis thaliana] | 9.9 |
| 64 | 123111 | H-2 CLASS II HISTOCOMPATIBILITY ANTIGEN, GAMMA | 9.7 |
| | | CHAIN (HLA-DR ANTIGENS ASSOCIATED INVARIANT | |
| | | CHAIN) >gi\|92086\|pir\|\|S04362 class II histocompatibility antigen- | |
| | | associated gamma chain, long splice form - rat | |
| 65 | 94377 | hypothetical protein 221 - turnip yellow mosaic virus | 9.6 |
| 66 | 2736449 | (AF039047) contains similarity to the BPTI/kunitz family of | 9.5 |
| | | inhibitors [Caenorhabditis elegans] | |
| 67 | 543894 | BETA-LACTAMASE PRECURSOR | 8.2 |
| 68 | 3881525 | (Z70038) cDNA EST EMBL:D32579 comes from this gene; cDNA | 7.6 |
| | | EST EMBL:D35254 comes from this gene; cDNA EST yk224b3.5 | |
| | | comes from this gene; cDNA EST yk357f10.5 comes from this gene | |
| 69 | 3128358 | (AF010496) ribose transport system permease protein RbsC | 7.5 |
| 70 | 3875771 | (Z68297) Weak similarity to Mouse DNA-binding protein BMI-1 | 7.3 |
| | | (SW:BMI1_MOUSE); cDNA EST EMBL:C07407 comes from this | |
| | | gene; cDNA EST EMBL:C07408 comes from this gene | |
| 71 | 21293 | (Y00759) 20 kDa protein (AA 1-212) [Spinacia oleracea] | 7.3 |
| 72 | 2131007 | (Z95890) pknE [Mycobacterium tuberculosis] | 7.2 |
| 73 | 245923 | (S83583) multiple-epitope polypeptide 1, MEP-1 construct] | 7 |
| 74 | 115347 | PROCOLLAGEN ALPHA 2(IV) CHAIN PRECURSOR | 6.9 |
| | | >gi\|84486\|pir\|\|S16366 collagen alpha 2(IV) chain precursor - pig | |
| | | roundworm >gi\|159649 (M67507) putative [Ascaris suum] | |
| 75 | 2072674 | (Z95120) rhlE [Mycobacterium tuberculosis] | 5.8 |
| 76 | 807646 | (M17294) unknown protein [Human herpesvirus 4] | 5.8 |
| 77 | 131706 | URID1NE 5′-MONOPHOSPHATE SYNTHASE OROTIDINE 5′- | 5.6 |
| | | PHOSPHATE DECARBOXYLASE | |
| 78 | 631593 | glucose transport protein homolog - sheep | 5 |
| 79 | 854064 | (X83413) U87 [Human herpesvirus 6] | 4.8 |
| 80 | 484695 | vascular cell adhesion molecule 1 - human | 4.2 |
| 81 | 1236146 | (U49864) fus 1 protein [Chlamydomonas reinhardtii] | 3.8 |
| 82 | 1083846 | acetyl-CoA carboxylase (EC 6.4.1.2) - Cyclotella cryptica >gi\|409450 | 3.5 |
| | | (L20784) acetyl-CoA carboxylase [Cyclotella cryptica] | |
| 83 | 2245054 | (Z97342) protein kinase homolog | 3.4 |
| 84 | 1717863 | UBIQUITIN-CONJUGATING ENZYME E2-21.2 KD (UBIQUITIN- | 3.4 |
| | | PROTEIN LIGASE) (UBIQUITIN CARRIER PROTEIN) | |
| | | >gi\|1077331\|pir\|\|S51438 probable membrane protein YLR306w - | |
| 85 | 1363331 | transcription factor IIIC alpha chain - rat alpha-subunit [Rattus | 3.4 |
| 86 | 2736327 | (AF038615) No definition line found [Caenorhabditis elegans] | 3.1 |
| 87 | 4587895 | (AF072509) glutamate receptor interacting protein 2 [Rattus | 3.1 |
| 88 | 1480746 | (U62529) matrix metalloproteinase 3 [Equus caballus] | 3 |
| 89 | 225858 | thyroid/steroid receptor related gene [Homo sapiens] | 3 |
| 90 | 3861293 | (AJ235273) 3-OXOACYL-[ACYL-CARRIER-PROTEIN] | 2.4 |
| 91 | 103812 | hypothetical protein 1 - zebra fish | 2 |
| 92 | 3256583 | (AP000001) 361aa long hypothetical protein [Pyrococcus horikoshii] | 1.7 |
| 93 | 1684985 | (U20633) NADH dehydrogenase subunit [Neuwiedia veratrifolia] | 1.5 |
| 94 | 452517 | (D26361) KIAA0042 [Homo sapiens] | 1.4 |
| 95 | 4218558 | (AJ011500) gra-orf26 [Streptomyces violaceoruber] | 1.1 |
| 96 | 4539280 | (AL049498) putative transcription factor | 0.28 |
| 97 | 4539280 | (AL049498) putative transcription factor | 0.26 |
| 98 | 3881842 | (Z78201) Similarity to E.coli 2-oxoglutarate dehydrogenase | 4e−019 |
| | | (SW:ODO1_ECOLI); cDNA EST EMBL:D32590 comes from this | |
| | | gene; cDNA EST EMBL:D32841 comes from this gene; cDNA EST | |
| | | EMBL:D34051 comes from this gene; cDNA EST EMBL:D35268 | |
| 99 | 4102877 | (AF017152) Shc binding protein [Mus musculus] | 6e−050 |
| 100 | 3327062 | (AB014524) KIAA0624 protein [Homo sapiens] | 5e−050 |
| 102 | 3126979 | (AF062483) SDP3 [Homo sapiens] | 6.1 |
| 103 | 3930776 | (AF099149) TRIAD1 type I [Homo sapiens] | 9e−068 |
| 106 | 2708741 | (AC003952) hypothetical protein [Arabidopsis thaliana] | 3.6 |
| 107 | 733554 | (U23450) similar to RNA-binding protein [Caenorhabditis elegans] | 1e−014 |
| 108 | 3851703 | (AF100421) p80 [Rattus norvegicus] | 7e−055 |
| 112 | 2120729 | GumG protein - Xanthomonas campestris | 6 |
| 120 | 3334526 | (AL021306) predicted using FGENEH [Homo sapiens] | 7.7 |
| 121 | 2407956 | (X87612) mono ATP-ribosaltransferase [Mus musculus] | 5.9 |
| 122 | 3877701 | (Z69662) predicted using Genefinder; similar to collagen; cDNA | 5.9 |
| | | EST EMBL:D75049 comes from this gene; cDNA EST | |
| | | EMBL:D72067 comes from this gene; cDNA EST EMBL:D72223 | |
| | | comes from this gene; cDNA EST EMBL:D72768 comes from this | |
| 123 | 2117780 | serine/threonine protein kinase - quail | 3.5 |
| 124 | 1722738 | MINOR CAPSID PROTEIN L2 >gi\|1020224 type 36] | 3.4 |
| 125 | 2494448 | HYPOTHETICAL PROTEIN MJ0208 Methanococcus jannaschii | 3.4 |
| | | >gi\|1498983 (U67476) 4Fe-4S iron-sulfur protein [Methanococcus | |
| 126 | 2494294 | NEUROGENIC LOCUS NOTCH 3 PROTEIN | 3.4 |
| 127 | 4493971 | (AL034559) predicted using hexExon; MAL3P7.11 (PFC0910w), | 0.61 |
| | | Hypothetical protein, len: 430 aa | |
| 138 | 3025005 | HYPOTHETICAL 28.8 KD PROTEIN IN MOAE-RHLE | 9.8 |
| | | INTERGENIC REGION >gi\|1787008 (AE000181) orf, hypothetical | |
| 139 | 3881856 | (Z79759) Similarity to Yeast endosomal P24A protein | 9.6 |
| | | (SW:EM70_YEAST); cDNA EST CEMSB40F comes from this | |
| | | gene; cDNA EST EMBL:C13538 comes from this gene; cDNA EST | |
| 140 | 1945493 | (U56965) Similar to NAD(P) transhydrogenase, mitochondrial; coded | 5.6 |
| | | for by C. elegans cDNA yk27c1.5; coded for by C. elegans cDNA | |
| | | yk35b9.5; coded for by C. elegans cDNA yk35b9.3; coded for by C. | |
| | | elegans cDNA yk161c9.3; coded for by C. elegans ... | |
| 141 | 3746071 | (AC005311) putative GTP-binding protein [Arabidopsis thaliana] | 5.6 |
| 142 | 2088843 | (AF003386) F59E12.9 gene product [Caenorhabditis elegans] | 3.2 |
| 143 | 1706551 | GLUCAN ENDO-1,3-BETA-GLUCOSIDASE PRECURSOR ((1- | 1.9 |
| | | >3)-BETA-GLUCAN ENDOHYDROLASE) aestivum] | |
| 144 | 629778 | chitinase (EC 3.2.1.14) - barley vulgare] | 1.9 |
| 145 | 2791276 | (Z95327) Cleavage Stimulation Factor sapiens] | 0.85 |
| 146 | 736767 | helper component protease [Turnip mosaic virus] | 0.5 |
| 147 | 1731209 | HYPOTHETICAL 35.4 KD PROTEIN CY20G9.19C | 0.22 |
| | | >gi\|1449291\|emb\|CAB00954\|(Z77162) hypothetical protein | |
| 148 | 3877063 | (Z37092) F44F4.10 [Caenorhabditis elegans] | 0.075 |
| 149 | 3878739 | (Z73428) similar to Zinc finger, C3HC4 type (RING finger); cDNA | 2e−029 |
| | | EST EMBL:D67323 comes from this gene [Caenorhabditis elegans] | |
| | | >gi\|3881096\|emb\|CAB16481\|finger); cDNA EST EMBL:D67323 | |
| | | comes from this gene | |
| 159 | 4454483 | (AC006234) putative kinase, 5′ partial | 9.1 |
| 160 | 3044086 | (AF055904) unknown [Myxococcus xanthus] | 5.4 |
| 161 | 1945493 | (U56965) Similar to NAD(P) transhydrogenase, mitochondrial; coded | 5.4 |
| | | for by C. elegans cDNA yk27c1.5; coded for by C. elegans cDNA | |
| | | yk35b9.5; coded for by C. elegans cDNA yk35b9.3; coded for by C. | |
| | | elegans cDNA yk161c9.3; coded for by C. elegans ... | |
| 162 | 730883 | SYNAPTIC VESICLE PROTEIN 2 (SV2) norvegicus] | 5.4 |
| 163 | 2351212 | (D88386) gag-pol polyprotein (precursor protein) [Friend murine | 4.2 |
| | | leukemia virus] | |
| 164 | 1722738 | MINOR CAPSID PROTEIN L2 >gi\|1020224 type 3] | 3.2 |
| 165 | 4115922 | (AF118222) contains similarity to ubiquitin carboxyl-terminal | 2.4 |
| | | hydrolase family 2 (Pfam:PF00443, score = 48.3, E = 3.5e−13, N = 2) | |
| | | and (Pfam:PF00442, Score = 40.0 E = 5.2e−08, N = 1) [Arabidopsis | |
| 166 | 1351639 | VERY HYPOTHETICAL 52.7 KD PROTEIN C8A4.05C IN | 2.4 |
| | | CHROMOSOME I >gi\|2130446\|pir\|\|S62521 hypothetical protein | |
| 167 | 4506857 | small inducible cytokine subfamily D (Cys-X3-Cys), member 1 | 2.4 |
| | | (fractalkine, neurotactin) >gi\|1888523 (U84487) CX3C chemokine | |
| | | precursor [Homo sapiens] >gi\|1899259 (U91835) CX3C chemokine | |
| 168 | 4505637 | protocadherin 8; PCDH8 sapiens] | 1.9 |
| 169 | 3249055 | (AF071210) casein kinase II alpha subunit [Spodoptera frugiperda] | 1.4 |
| 170 | 854065 | (X83413) U88 [Human herpesvirus 6] | 1e−005 |
| 171 | 854065 | (X83413) U88 [Human herpesvirus 6] | 1e−005 |
| 191 | 3150072 | (AF046996) preS1 surface protein [woolly monkey hepatitis B Virus] | 6.9 |
| 192 | 2622845 | (AE000928) corrinoid/iron-sulfur protein, large subunit | 6.9 |
| 193 | 1083554 | tyrosine phosphoprotein SLP-76 - mouse | 6.9 |
| 194 | 1708868 | LOW-DENSITY LIPOPROTEIN RECEPTOR-RELATED | 5.2 |
| | | PROTEIN PRECURSOR (LRP) Caenorhabditis elegans >gi\|156360 | |
| | | (M96150) LDL receptor-related protein [Caenorhabditis elegans] | |
| | | Genefinder; Identity to C.elegans Low density lipid (LDL) receptor- | |
| 195 | 3169030 | (AL023702) putative insertion element IS1647 transposase | 4 |
| | | [Streptomyces coelicolor] | |
| 196 | 728835 | !!!! ALU SUBFAMILY SC WARNING ENTRY | 4 |
| 197 | 484695 | vascular cell adhesion molecule 1 - human | 3.9 |
| 198 | 2204102 | (Y13898) glutathione-S-transferase | 3.9 |
| 199 | 1118071 | (U41554) coded for by C. elegan cDNA yk38a7.3; coded for by C. | 2.3 |
| | | elegans cDNA yk8c6.3; coded for by C. elegans cDNA yk25d12.5; | |
| | | coded for by C. elegans cDNA yk25d12.3; coded for by C. elegans | |
| | | cDNA yk8c6.5; coded for by C. elegans cDNA yk7f8.5;... | |
| 200 | 799146 | (U24495) 2a protein [Broad bean mottle virus] | 1.4 |
| 201 | 73416 | E2 protein - human papillomavirus type 18 papillomavirus type 18] | 1.4 |
| 202 | 294529 | (L14933) convertase PC5 [Rattus norvegicus] | 0.45 |
| 203 | 124141 | TRANS-ACTING TRANSCRIPTIONAL PROTEIN ICP4 | 0.031 |
| | | (TRANSCRIPTIONAL ACTIVATOR IE175) (ALPHA-4 | |
| | | PROTEIN) human herpesvirus 1 >gi\|59558\|emb\|CAA32286\| | |
| | | (X14112) RS1 RS1 [Human herpesvirus 1] | |
| | | >gi\|59849\|emb\|CAA29763\|1298) [Human herpesvirus 1] | |
| 204 | 4503511 | UNKNOWN >gi\|3264861 (U97670) eukaryotic translation initiation | 3e−010 |
| | | factor eIF3, p35 subunit [Homo sapiens] | |
| 205 | 4503511 | UNKNOWN >gi\|3264861 (U97670) eukaryotic translation initiation | 3e−010 |
| | | factor eIF3, p35 subunit [Homo sapiens] | |
| 206 | 3298605 | (AF057365) UDP N-acetylglucosamine transporter [Canis familiaris] | 8e−033 |
| 221 | 3116148 | (AL023290) putative ATP-dependent RNA helicase | 8.7 |
| | | [Schizosaccharomyces pombe] | |
| 222 | 4544400 | (AC007047) hypothetical protein [Arabidopsis thaliana] | 8.7 |
| 223 | 1086982 | E1 replication protein [bovine papillomavirus type 1 BPV-1, Peptide, | 8.6 |
| 224 | 1762434 | (U59924) nitric oxide synthase [Sus scrofa] | 8.6 |
| 225 | 731689 | HYPOTHETICAL 433.2 KD PROTEIN IN HXT5-NRK1 | 8.5 |
| | | INTERGENIC REGION >gi\|626646\|pir\|\|S46715 hypothetical protein | |
| | | YHR099w - yeast (Saccharomyces cerevisiae) >gi\|487929 (U00060) | |
| 226 | 2351132 | (D85200) S glycoprotein [Brassica oleracea] | 8.5 |
| 227 | 1762434 | (U59924) nitric oxide synthase [Sus scrofa] | 8.5 |
| 228 | 4493995 | (AL034559) predicted using hexExon; MAL3P7.47 (PFC1080c), | 6.7 |
| | | Hypothetical protein, len: 232 aa | |
| 229 | 462685 | NUCLEOCAPSID PROTEIN coronavirus (strain K378) | 5.2 |
| | | >gi\|58850\|emb\|CAA47246\| | |
| 230 | 4519268 | (AB024314) CREA [Aspergillus aculeatus] | 5 |
| 231 | 1364138 | probable polymerase - soybean dwarf virus polymerase [Soybean | 5 |
| 232 | 1709938 | ADENYLOSUCCINATE SYNTHETASE adenylosuccinate synthase | 3.8 |
| | | (EC 6.3.4.4) - Thiobacillus ferrooxidans >gi\|48168\|emb\|CAA40593\| | |
| | | (X57324) purA adenylosuccinate synthetase [Thiobacillus | |
| 233 | 1947132 | (AF000262) the second exon has similarity to collagen alpha in a | 2.9 |
| | | glycine- and proline-rich region | |
| 234 | 2245054 | (Z97342) protein kinase homolog | 2.9 |
| 235 | 2736517 | (AF039052) contains similarity to helicases | 1.7 |
| 236 | 1620170 | (U42580) a499L [Paramecium bursaria Chlorella virus 1] | 1.7 |
| 237 | 4336718 | (AF104031) caudal-related homeobox protein | 1.3 |
| 238 | 114969 | BETA-GLUCOSIDASE A (GENTIOBIASE) 3.2.1.21) - | 0.76 |
| | | Caldocellum saccharolyticum 1-455) [Caldicellulosiruptor | |
| 239 | 1170313 | HOMEOBOX PROTEIN CDX-1 (CAUDAL-TYPE HOMEOBOX | 0.44 |
| | | PROTEIN 1) >gi\|1083361\|pir\|\|A49303 homeotic protein Cdx-1 - | |
| 258 | 1172222 | (U44834) polyphosphate glucokinase [Mycobacterium tuberculosis] | 8.4 |
| | | >gi\|1588398\|prf\|\|2208389A phosphate glucokinase [Mycobacterium | |
| 259 | 2959862 | (AJ002303) synaptogyrin 1c [Homo sapiens] | 8.1 |
| 260 | 2983552 | (AE000721) cation efflux system (czcD-like) [Aquifex aeolicus] | 8 |
| 261 | 104800 | nicotinic acetylcholine receptor alpha-5 chain precursor - chicken | 4.8 |
| 262 | 3875957 | (Z78013) predicted using Genefinder; cDNA EST EMBL:D72806 | 4.8 |
| | | comes from this gene; cDNA EST EMBL:D75743 comes from this | |
| | | gene; cDNA EST yk417b6.3 comes from this gene; cDNA EST | |
| | | yk417b6.5 comes from this gene; cDNA EST yk276c6.3 com ... | |
| 263 | 746475 | (U23511) No definition line found [Caenorhabditis elegans] | 4.7 |
| 264 | 1899232 | (U90333) aquarius gene product [Mus musculus] | 2.8 |
| 265 | 3123186 | AFLATOXIN BIOSYNTHESIS REGULATORY PROTEIN | 2.8 |
| 266 | 2500589 | NUCLEOLYSIN TIAR (TIA-1 RELATED PROTEIN) >gi\|1592563 | 2.8 |
| | | (U55861) RNA binding protein TIAR | |
| 267 | 90253 | leukocyte common antigen precursor - mouse musculus] | 1.7 |
| 268 | 2827553 | (AL021635) predicted protein [Arabidopsis thaliana] | 1.6 |
| 269 | 3695397 | (AF096372) No definition line found [Arabidopsis thaliana] | 0.42 |
| 270 | 2564330 | (AB006629) KIAA0291 [Homo sapiens] | 8e−006 |
| 271 | 3413860 | (AB007918) KIAA0449 protein [Homo sapiens] | 3e−009 |
| 272 | 4454698 | (AF070661) HSPC005 [Homo sapiens] | 1e−010 |
| 289 | 266328 | PROBABLE PROCESSING AND TRANSPORT PROTEIN | 6 |
| | | (INFECTED CELL PROTEIN 18.5) murine cytomegalovirus (strain | |
| 290 | 2204102 | (Y13898) glutathione-S-transferase | 3.5 |
| 291 | 2887280 | (AJ002140) DNA | 3.5 |
| 292 | 4567223 | (AC007119) hypothetical protein | 3.1 |
| 303 | 2077849 | (AB003348) E1 protein [Rubella virus] | 9.9 |
| 304 | 845311 | (L40021) polyprotein [Feline calicivirus] | 7.3 |
| 305 | 266328 | PROBABLE PROCESSING AND TRANSPORT PROTEIN | 5.6 |
| | | (INFECTED CELL PROTEIN 18.5) murine cytomegalovirus (strain | |
| 306 | 103469 | homeotic protein bicoid - fruit fly pseudoobscura] | 5.6 |
| 307 | 2204102 | (Y13898) glutathione-S-transferase | 3.3 |
| 308 | 125394 | HOMOSERINE KINASE (HK) Pseudomonas aeruginosa | 3.3 |
| | | >gi\|45425\|emb\|CAA46169\|(X65034) homoserine kinase | |
| | | [Pseudomonas aeruginosa] | |
| 309 | 2353163 | (AF015560) RO11 [Neurospora crassa] | 0.66 |
| 310 | 484695 | vascular cell adhesion molecule 1 - human | 0.64 |
| 311 | 3874146 | (Z72502) Similarity with proline-rich proteoglycan (PIR accession | 0.52 |
| | | number B48013); cDNA EST EMBL:D66054 comes from this gene; | |
| | | cDNA EST EMBL:D69700 comes from this gene; cDNA EST | |
| | | yk446b10.3 comes from this gene; cDNA EST yk446b10... | |
| 312 | 117589 | CIRCUMSPOROZOITE PROTEIN PRECURSOR precursor - | 9e−005 |
| | | Plasmodium knowlesi (strain Nuri) >gi\|160198 | |
| 313 | 2781381 | (AC004013) Similar to rabbit A-kinase-anchoring protein sapiens] | 1e−019 |
| 317 | 730269 | PAN1 PROTEIN >gi\|626783\|pir\|\|S48440 poly(A)-specific | 7.2 |
| | | ribonuclease (EC 3.1.13.4) - yeast PAN1_YEAST P32521 PAB- | |
| | | DEPENDENT POLY(A)-SPECIFIC RIBONONUCLEASE but | |
| 318 | 3201610 | (AC004669) unknown protein [Arabidopsis thaliana] | 5.4 |
| 319 | 3129975 | (AL023516) Complement C4 [Gallus gallus] | 2.4 |
| 322 | 1850592 | (U88295) carnitine palmitoyltransferase II [Rattus norvegicus] | 6.9 |
| 323 | 3881650 | (Z70757) Weak similarity to the XFIN protein (Swiss Prot accession | 6.6 |
| | | number P08045) | |
| 324 | 2653998 | (AF032884) tnsC [Thiobacillus ferrooxidans] | 8.2 |
| 326 | 145111 | (M18083) periplasmic [NiFe] hydrogenase protein small subunit | 0.37 |
| | | precursor [Desulfovibrio gigas] | |
| 327 | 2244839 | (Z97337) hypothetical protein [Arabidopsis thaliana] | 3.1 |
| 328 | 3935180 | (AC004557) F17L21.23 [Arabidopsis thaliana] | 4.6 |
| 332 | 3328899 | (AE001320) hypothetical protein [Chlamydia trachomatis] | 7.4 |
| 333 | 4096264 | (U26528) Ig heavy chain [Oryctolagus cuniculus] | 7.1 |
| 334 | 3023209 | 168 KD SURFACE-LAYER PROTEIN PRECURSOR | 5.8 |
| | | [CONTAINS: 120 KD SURFACE-EXPOSED PROTEIN | |
| | | MEMBRANE PROTEIN OMPB); 32 KD BETA PEPTIDE] | |
| | | precursor - Rickettsia typhi >gi\|1871223 (L04661) crystalline surface | |
| 335 | 4589400 | (AB009958) polyprotein [satsuma dwarf virus] | 5.7 |
| 336 | 1709356 | SODIUM-DEPENDENT NORADRENALINE TRANSPORTER | 5.4 |
| | | (NOREPINEPHRINE TRANSPORTER) (NET) bovine | |
| | | >gi\|1050439\|emb\|CAA55645\|(X79015) norepinephrine transporter | |
| 337 | 4512671 | (AC006931) unknown protein [Arabidopsis thaliana] | 1.9 |
| 343 | 3757516 | (AC005167) putative TMV resistance protein [Arabidopsis thaliana] | 3.8 |
| 344 | 586480 | HYPOTHETICAL 62.6 KD PROTEIN IN CDS1-RPL2 | 0.26 |
| | | INTERGENIC REGION >gi\|626496\|pir\|\|S45886 hypothetical protein | |
| | | YBR030w - yeast (Saccharomyces cerevisiae) | |
| 345 | 4239381 | 88K E-26-specific domain protein Pok - Drosophila | 0.054 |
| | | >gi\|217342\|dbj\|BAA01080\|(D10228) Ets domain protein | |
| 347 | 1653153 | (D90911) acriflavin resistance protein | 5.5 |
| 348 | 2147342 | E4 protein - human papillomavirus type 14D | 0.67 |
| 349 | 3914412 | GENOME POLYPROTEIN [CONTAINS: N-TERMINAL | 0.95 |
| | | PROTEIN (P1); HELPER COMPONENT PROTEINASE | |
| | | INCLUSION PROTEIN (CI); 6 KD PROTEIN 2 (6K2); GENOME- | |
| | | LINKED PROTEIN (VPG); NUCLEA... mosaic virus] | |
| 350 | 2997741 | (AF054838) tetraspan TM4SF; Tspan-1 [Homo sapiens] | 1e−017 |
| 351 | 1086900 | (U41278) contains similarity to G beta repeats | 3e−027 |
| 372 | 129036 | 2-OXOGLUTARATE DEHYDROGENASE E1 COMPONENT | 9.8 |
| | | (ALPHA-KETOGLUTARATE DEHYDROGENASE) | |
| | | dehydrogenase [Azotobacter vinelandii] | |
| 373 | 2120777 | cellulose synthase - Agrobacterium tumefaciens >gi\|710493 (L38609) | 9.7 |
| | | cellulose synthase celA gene [Agrobacterium tumefaciens] | |
| 374 | 628527 | hypothetical protein - Pseudomonas syringae syringae] | 9.6 |
| 375 | 123395 | HOMEOBOX PROTEIN NK-1 (S59/2) fly (Drosophila | 7.8 |
| | | melanogaster) >gi\|8531\|emb\|CAA390671 sp.] | |
| 376 | 3722000 | (AF035323) survival motor neuron protein | 7.8 |
| 377 | 3881030 | (AL021493) Y51A2B.2 [Caenorhabditis elegans] | 7.4 |
| 378 | 4505777 | PHD finger protein 1 >gi\|2660720 1) [Homo sapiens] | 6 |
| 379 | 2190501 | (X53706) immunoglobulin alpha-2 heavy chain [Pan troglodytes] | 5.8 |
| 380 | 2688643 | (AE001171) conserved hypothetical integral membrane protein | 5.7 |
| | | [Borrelia burgdorferi] | |
| 381 | 1086832 | (U41264) coded for by C. elegans cDNA cm13g1; Similar to | 5.4 |
| | | bumetanide-sensitive Na-K-Cl cotransporter. | |
| 382 | 1931639 | (U95973) lysophospholipase isolog [Arabidopsis thaliana] | 4.6 |
| 383 | 3757516 | (AC005167) putative TMV resistance protein [Arabidopsis thaliana] | 4.5 |
| 384 | 4504567 | interferon consensus sequence binding protein 1 >gi\|2275153 | 4.4 |
| | | (M91196) DNA-binding protein [Homo sapiens] | |
| 385 | 464822 | SUR1 PROTEIN >gi\|542362\|pir\|\|S41798 SUR1 protein - yeast | 4.4 |
| | | (Saccharomyces cerevisiae) cerevisiae] >gi\|976268\|dbj\|BAA05628\| | |
| 386 | 3023738 | EXOSTOSIN-L (MULTIPLE EXOSTOSIS-LIKE PROTEIN) | 4.3 |
| | | >gi\|1524413 (U67191) multiple exostosis-like protein [Homo | |
| 387 | 3878603 | (Z83116) M01B2.3 [Caenorhabditis elegans] | 3.4 |
| 388 | 3745858 | (L33180) BRO-a [Bombyx mori nuclear polyhedrosis virus] | 3.3 |
| 389 | 4321758 | (AF060669) polyprotein [Hepatitis E virus] | 3.3 |
| 390 | 2661037 | (AF035285) dihydroxyacetone phosphate acyltransferase | 3.3 |
| 391 | 2950355 | (AJ223300) homebox protein DRx [Drosophila melanogaster] | 2.7 |
| 392 | 3821973 | (AF061140) merozoite surface protein 1 [Plasmodium falciparum] | 2.5 |
| 393 | 1552187 | (D84375) ORF3 [Oryzias latipes] | 2 |
| 394 | 2493417 | S100 CALCIUM-BINDING PROTEIN A13 calcium-binding protein | 1.6 |
| | | A13 [Mus musculus] | |
| 395 | 3550082 | (AF071186) WW domain binding protein 11 [Mus musculus] | 1.5 |
| 396 | 1082665 | oligodendrocyte-specific proline-rich protein 2 - human | 1.5 |
| | | >gi\|1408050\|dbj\|BAA05660\|(D28114) MOBP [Homo sapiens] | |
| 397 | 3874925 | (Z68296) Similarity to Mouse A-RAF proto-oncogene | 1.2 |
| | | serine/threonine-protein kinase gene; cDNA EST EMBL:T01018 | |
| | | comes from this gene; cDNA EST EMBL:D33256 comes from this | |
| 398 | 2500886 | PROBABLE SIGNAL RECOGNITION 54 KD PROTEIN (SRP54) | 1.2 |
| | | >gi\|2129283\|pir\|\|E64312 signal recognition particle protein - | |
| | | Methanococcus jannaschii subunit SRP54 [Methanococcus | |
| 399 | 2291241 | (AF016428) contains similarity to Vaccinia virus 37 kd envelope | 1.1 |
| | | protein [Caenorhabditis elegans] | |
| 400 | 309958 | (L06798) class D tetracycline/H+ antiporter [Plasmid pRA1] | 0.91 |
| | | >gi\|575937\|dbj\|BAA03719\|(D16172) PP-TETA protein | |
| 401 | 3877379 | (Z46267) F49E2.2 [Caenorhabditis elegans] | 0.39 |
| 402 | 4539280 | (AL049498) putative transcription factor | 0.29 |
| 403 | 3293235 | (U96413) putative opine synthase [Agrobacterium tumefaciens] | 0.097 |
| 404 | 3329636 | (AF078786) No definition line found [Caenorhabditis elegans] | 0.003 |
| 405 | 3947614 | (AL023828) cDNA EST yk491f8.5 comes from this gene | 8e−019 |
| | | [Caenorhabditis elegans] | |
| 406 | 3947614 | (AL023828) cDNA EST yk491f8.5 comes from this gene | 1e−019 |
| | | [Caenorhabditis elegans] | |
| 407 | 3880930 | (AL021481) similar to Phosphoglucomutase and | 1e−022 |
| | | phosphomannomutase phosphoserine; cDNA EST EMBL:D36168 | |
| | | comes from this gene; cDNA EST EMBL:D70697 comes from this | |
| | | gene; cDNA EST yk373h9.5 comes from this gene; cDNA EST | |
| 408 | 3184082 | (AL023781) N-terminal acetyltransferase 1 | 1e−028 |
| 409 | 2500558 | PUTATIVE RIBONUCLEASE III (RNASE III) | 7e−030 |
| | | >gi\|3876420\|emb\|CAB03005\|(Z81070) similar to ribonuclease | |
| 410 | 3877493 | (Z48583) similar to ATPases associated with various cellular | 5e−044 |
| | | activities (AAA); cDNA EST EMBL:Z14623 comes from this gene; | |
| | | cDNA EST EMBL:D75090 comes from this gene; cDNA EST | |
| | | EMBL:D72255 comes from this gene; cDNA EST yk200e4.5... | |
| 411 | 3298605 | (AF057365) UDP N-acetylglucosamine transporter [Canis familiaris] | 1e−051 |
| 412 | 4103604 | (AF026031) putative mitochondrial outer membrane protein import | 1e−059 |
| | | receptor [Homo sapiens] | |
| 413 | 2662165 | (AB007902) HH0712 cDNA clone for KIAA0442 has a 574-bp | 4e−070 |
| | | insertion at position 1474 of the sequence of KIAA0442. [Homo | |
| 414 | 3882145 | (AB018255) KIAA0712 protein [Homo sapiens] | 9e−072 |
| 477 | 117552 | CHAPERONE PROTEIN CS3-1 PRECURSOR Escherichia coli | 9.3 |
| | | >gi\|41156\|emb\|CAA34815\|(X16944) 27 kD protein (AA 1 to 241) | |
| | | [Escherichia coli] | |
| 478 | 2983622 | (AE000726) hypothetical protein [Aquifex aeolicus] | 9.3 |
| 479 | 2088694 | (AF003135) W03F11.1 gene product [Caenorhabditis elegans] | 9.3 |
| 480 | 4240237 | (AB020681) KIAA0874 protein [Homo sapiens] | 9.2 |
| 481 | 1864073 | (U63002) T-cell receptor beta chain [Callithrix jacchus] | 9 |
| 482 | 2147334 | DNA helicase II 70K chain homolog - Rhipicephalus appendiculatus | 8.9 |
| | | >gi\|1063592 (L41356) ku autoantigen p70 homologue [Rhipicephalus | |
| | | appendiculatus] | |
| 483 | 3323145 | (AE001253) T. pallidum predicted coding region TP0827 | 8.7 |
| 484 | 2183251 | (AF002227) putative polyprotein [border disease virus strain C413] | 8.6 |
| 485 | 3875768 | (Z92830) cDNA EST yk223c7.5 comes from this gene; cDNA EST | 8.6 |
| | | yk307b2.5 comes from this gene; cDNA EST yk377h2.5 comes from | |
| | | this gene; cDNA EST yk223c7.3 comes from this gene; cDNA EST | |
| | | yk307b2.3 comes from this gene [Caenorhabditi... | |
| 486 | 1351589 | HYPOTHETICAL PROTEIN MG456 Mycoplasma genitalium | 8.4 |
| | | (SGC3) >gi\|1046175 (U39732) M. genitalium predicted coding | |
| | | region MG456 [Mycoplasma genitalium] >gi\|3845050 (U39727) | |
| | | conserved hypothetical protein [Mycoplasma genitalium] | |
| 487 | 3023800 | GLUCOSE-6-PHOSPHATASE (G6PASE) familiaris] | 6.9 |
| 488 | 450722 | (X71982) ORF j11R [African swine fever virus] | 6.8 |
| 489 | 2633756 | (Z99111) similar to heavy metal-transporting ATPase [Bacillus | 6.6 |
| 490 | 4049887 | (AF063866) ORF MSV024 ALI motif gene family protein | 6.5 |
| 491 | 1363994 | abdominal-A homeodomain protein - Junonia coenia >gi\|797277 | 5.3 |
| | | (L41931) abdominal-A homeodomain protein [Junonia coenia] | |
| 492 | 2370493 | (Z98944) hypothetical protein | 5.3 |
| 493 | 140631 | HYPOTHETICAL 25.9 KD PROTEIN FP25.9 [Fowlpox virus] | 5.3 |
| 494 | 400927 | RIBONUCLEOPROTEIN RB97D ribonucleoprotein [Drosophila | 5.1 |
| 495 | 2462935 | (Y12321) open reading frame 1 [Brassica oleracea] | 5 |
| 496 | 2160189 | (AC000132) Similar to A. thaliana receptor-like protein kinase | 5 |
| | | (gb\|RLK5_ARATH). ESTs gb\|ATTS0475, gb\|ATTS4362 come from | |
| | | this gene. [Arabidopsis thaliana] | |
| 497 | 1850972 | (U84144) putative fimbrial chaperone [Escherichia coli] | 4.9 |
| 498 | 2145678 | B1549_C3_230 protein - Mycobacterium leprae | 4.2 |
| 499 | 3182952 | CGMP-INHIBITED 3′, 5′-CYCLIC PHOSPHODIESTERASE A | 4.2 |
| | | (CYCLIC GMP INHIBITED PHOSPHODIESTERASE A) (CGI- | |
| | | PDE A) >gi\|1145304 (U38179) cyclic nucleotide phosphodiesterase | |
| 500 | 4493738 | (AL034358) predicted using hexExon; L4830.1, Hypothetical | 4.2 |
| | | protein, len: 1107 [Leishmania major] | |
| 501 | 730336 | PUTATIVE POLYKETIDE SYNTHASE PKSL 2.3.1.-) - Bacillus | 4.2 |
| | | subtilis >gi\|40058\|emb\|CAA78479\|subtilis] >gi\|528996 (U11039) | 4.2 |
| | | polyketide synthase polyketide synthase of type I [Bacillus subtilis] | |
| 502 | 188908 | (M19720) L-myc protein [Homo sapiens] | 4 |
| 503 | 4056436 | (AC005990) EST gb\|AA650912 comes from this gene. | 3.9 |
| 504 | 3874349 | (Z81035) predicted using Genefinder; Similarity to Sheep | 3.9 |
| | | vasopressin V1A receptor (SW:P48043) | |
| 505 | 3874067 | (Z93374) similar to 7TM receptor elegans] | 3.9 |
| 506 | 3979818 | (Z49967) cDNA EST EMBL:T00743 comes from this gene; cDNA | 3.2 |
| | | EST EMBL:D69356 comes from this gene; cDNA EST | |
| | | EMBL:D65790 comes from this gene; cDNA EST EMBL:D70463 | |
| | | comes from this gene; cDNA EST EMBL:D66620 comes from this | |
| 507 | 119462 | ENVELOPE POLYPROTEIN GP160 PRECURSOR 2] | 3.2 |
| | | >gi\|225570\|prf\|\|1306388H gene env [Human immunodeficiency virus | |
| 508 | 117657 | COLICIN V PRODUCTION PROTEIN (DEDE PROTEIN) (PUR | 3.1 |
| | | REGULON 18 KD PROTEIN) colicin V production [Escherichia | |
| | | coli] dedE protein [Escherichia coli] | |
| 509 | 114441 | ATP SYNTHASE A CHAIN (PROTEIN 6) 3.6.1.34) protein 6 - fruit | 3 |
| | | fly (Drosophila yakuba) mitochondrion (SGC4) | |
| | | >gi\|12921\|emb\|CAA25442\|(X00924) ATPase subunit 6 [Drosophila | |
| 510 | 1280094 | (U55369) No definition line found [Caenorhabditis elegans] | 3 |
| 511 | 226131 | thyroid hormone receptor alpha 2 [Rattus norvegicus] | 3 |
| 512 | 3860855 | (AJ235271) GUANOSINE PENTAPHOSPHATE | 2.9 |
| | | PHOSPHOHYDROLASE (gppA) [Rickettsia prowazekii] | |
| 513 | 584834 | CELLULOSE SYNTHASE OPERON C PROTEIN xylinus] | 2.4 |
| | | >gi\|1090660\|prf\|\|2019362C acsC gene | |
| 514 | 629777 | chitinase (EC 3.2.1.14) - barley vulgare] | 2.2 |
| 515 | 2555183 | (AF026504) SPA-1 like protein p1294 [Rattus norvegicus] | 2.2 |
| 516 | 4503737 | forkhead (Drosophila) homolog 1 HEAD DOMAIN PROTEIN | 1.8 |
| | | FKHR >gi\|631145\|pir\|\|S40521 FKHR protein - human >gi\|435423 | |
| | | (U02310) fork head domain protein [Homo sapiens] | |
| | | >gi\|737918\|prf\|\|1923399A FKHR gene [Homo sapiens] | |
| 517 | 3790719 | (AF099916) contains similarity to C2H2-type zinc fingers | 1.8 |
| 518 | 1785942 | (U83412) CAG [Drosophila melanogaster] | 1.8 |
| 519 | 3877036 | (Z81079) predicted using Genefinder; similar to collagen; cDNA | 1.4 |
| | | EST EMBL:M88890 comes from this gene; cDNA EST | |
| | | EMBL:Z14325 comes from this gene; cDNA EST EMBL:D27520 | |
| | | comes from this gene; cDNA EST EMBL:D72240 comes from this | |
| 520 | 281654 | hypothetical protein 24 - Agrobacterium tumefaciens plasmid | 1.3 |
| | | pTi15955 >gi\|39086\|emb\|CAA25186\|tumefaciens] | |
| 521 | 114972 | BETA-GLUCOSIDASE (GENTIOBIASE) Ruminococcus albus | 1.3 |
| | | >gi\|45968\|emb\|CAA33461\|(X15415) beta-glucosidase (AA 1-947) | |
| | | [Ruminococcus albus] albus] | |
| 522 | 1707085 | (U80451) Similar to collagen [Caenorhabditis elegans] | 1.3 |
| 523 | 483163 | nonstructural protein - hepatitis E virus RNA-directed RNA | 1.3 |
| | | polymerase [Hepatitis E virus] | |
| 524 | 4455275 | (AL035527) putative protein [Arabidopsis thaliana] | 0.99 |
| 525 | 4376875 | (AE001642) CT465 hypothetical protein | 0.45 |
| 526 | 2494911 | HYPOTHETICAL PROTEIN KIAA0124 product is novel. [Homo | 0.44 |
| 527 | 4539280 | (AL049498) putative transcription factor | 0.28 |
| 528 | 1842255 | (U74613) hepatocyte nuclear factor-3/fork head homolog 11B [Homo | 0.28 |
| 529 | 231977 | D(4) DOPAMINE RECEPTOR (D(2C) DOPAMINE RECEPTOR) | 0.073 |
| | | >gi\|203916 (M84009) dopamine receptor D4 | |
| 530 | 987050 | (X65335) lacZ [Cloning vector pSV-beta-Galactosidase Control] | 0.042 |
| 531 | 2493416 | S100 CALCIUM-BINDING PROTEIN A13 calcium-binding protein | 0.031 |
| | | A13 (S100A13) [Homo sapiens] | |
| 532 | 1778844 | (U83086) LimA [Dictyostelium discoideum] | 0.0006 |
| 533 | 3288470 | (AJ224360) surf5c [Homo sapiens] | 5e−015 |
| 534 | 3947614 | (AL023828) cDNA EST yk491f8.5 comes from this gene | 1e−015 |
| | | [Caenorhabditis elegans] | |
| 535 | 1086860 | (U41272) Similar to man(9)-alpha-mannosidase. | 3e−028 |
| 536 | 3875451 | (Z66496) cDNA EST EMBL:D71941 comes from this gene; cDNA | 2e−030 |
| | | EST EMBL:D74691 comes from this gene; cDNA EST | |
| | | EMBL:D76330 comes from this gene; cDNA EST EMBL:D65192 | |
| | | comes from this gene; cDNA EST EMBL:D68540 comes from this | |
| 537 | 3877493 | (Z48583) similar to ATPases associated with various cellular | 1e−035 |
| | | activities (AAA); cDNA EST EMBL:Z14623 comes from this gene; | |
| | | cDNA EST EMBL:D75090 comes from this gene; cDNA EST | |
| | | EMBL:D72255 comes from this gene; cDNA EST yk200e4.5... | |
| 538 | 3169010 | (AJ006412) putative GTP-binding protein | 2e−042 |
| 539 | 3877493 | (Z48583) similar to ATPases associated with various cellular | 4e−044 |
| | | activities (AAA); cDNA EST EMBL:Z14623 comes from this gene; | |
| | | cDNA EST EMBL:D75090 comes from this gene; cDNA EST | |
| | | EMBL:D72255 comes from this gene; cDNA EST yk200e4.5... | |
| 540 | 3877493 | (Z48583) similar to ATPases associated with various cellular | 3e−044 |
| | | activities (AAA); cDNA EST EMBL:Z14623 comes from this gene; | |
| | | cDNA EST EMBL:D75090 comes from this gene; cDNA EST | |
| | | EMBL:D72255 comes from this gene; cDNA EST yk200e4.5... | |
| 608 | 3882189 | (AB018277) KIAA0734 protein [Homo sapiens] | 9.9 |
| 609 | 3877937 | (Z48716) similarity to a transmembranous region of ubiquinol- | 9.6 |
| | | cytochrome-C reductase (PIR accession number S38960); cDNA | |
| | | EST EMBL:T00461 comes from this gene; cDNA EST | |
| | | EMBL:D27071 comes from this gene; cDNA EST EMBL:D27070 | |
| 610 | 3643019 | (AF064703) glucose transporter 1; CeGT1 [Drosophila | 8.4 |
| 611 | 3219946 | HYPOTHETICAL PROTEIN MJ1394 Methanococcus jannaschii | 8 |
| | | >gi\|1592041 (U67579) conserved hypothetical protein | |
| 612 | 3219946 | HYPOTHETICAL PROTEIN MJ1394 Methanococcus jannaschii | 8 |
| | | >gi\|1592041 (U67579) conserved hypothetical protein | |
| 613 | 2833328 | FIBRILLARIN | 7.9 |
| 614 | 4505481 | nucleoporin 88 kD complex protein [Homo sapiens] | 7.8 |
| 615 | 220578 | (D00570) open reading frame (251 AA) [Mus musculus] | 7.8 |
| 616 | 266810 | NAD(P) TRANSHYDROGENASE SUBUNIT BETA | 7.6 |
| | | transhydrogenase [Escherichia coli] transhydrogenase (B-specific) | |
| | | (EC 1.6.1.1) b chain NAD(P)+transhydrogenase (B-specific) (EC | |
| | | (1.6.1.1) b chain [Escherichia coli] >gi\|1787886 (AE000255) pyridine | |
| 617 | 807646 | (M17294) unknown protein [Human herpesvirus 4] | 7.6 |
| 618 | 829186 | (X03879) rudimentary protein fragment | 7.4 |
| 619 | 4322346 | (AF081825) sodium-dependent high-affinity dicarboxylate | 7.4 |
| | | transporter [Rattus norvegicus] | |
| 620 | 3334785 | (AL031107) hypothetical protein SC5A7.04c | 7.4 |
| 621 | 1346720 | PHOSPHATIDYLINOSITOL-4-PHOSPHATE 5-KINASE TYPE II | 7.3 |
| | | ALPHA (PIP5KII-ALPHA) KINASE) >gi\|1079474\|pir\|\|A55967 1- | |
| | | phosphatidylinositol-4-phosphate 5-kinase (EC 2.7.1.68) - human | |
| | | >gi\|758697 (U14957) 53 K isoform of Type II phosphatidylinositol-4- | |
| 622 | 4105819 | (AF050175) Rab7 [Homo sapiens] | 6.4 |
| 623 | 155865 | (M93125) 80 kDa protein [Babesia bovis] | 6.3 |
| 624 | 2133638 | boule protein - fruit fly (Drosophila melanogaster) >gi\|1395211 | 6.2 |
| | | (U51858) boule protein | |
| 625 | 1788052 | (AE000270) putative transport system permease protein | 6.2 |
| 626 | 3875616 | (Z77657) F08H9.9 [Caenorhabditis elegans] | 6.2 |
| 627 | 2499150 | HYPOTHETICAL PROTEIN IN CPS REGION | 6.2 |
| 628 | 1170758 | GALECTIN-3 (GALACTOSE-SPECIFIC LECTIN 3) (MAC-2 | 6.1 |
| | | ANTIGEN) (IGE-BINDING PROTEIN) (35 KD LECTIN) | |
| | | (CARBOHYDRATE BINDING PROTEIN 35) (CBP 35) | |
| 629 | 2495335 | HEAT SHOCK PROTEIN 42 (42 KD HEAT SHOCK PROTEIN) | 6 |
| | | >gi\|1077219\|pir\|\|S49767 heat shock protein HSP42 - yeast | |
| | | (Saccharomyces cerevisiae) | |
| 630 | 1086677 | (U41020) coded for by C. elegans cDNA yk64f5.3; coded for by C. | 6 |
| | | elegans cDNA yk64f5.5; Similar to zinc finger. [Caenorhabditis | |
| 631 | 1170758 | GALECTIN-3 (GALACTOSE-SPECIFIC LECTIN 3) (MAC-2 | 6 |
| | | ANTIGEN) (IGE-BINDING PROTEIN) (35 KD LECTIN) | |
| | | (CARBOHYDRATE BINDING PROTEIN 35) (CBP 35) | |
| 632 | 440957 | Achaete-Scute homolog Mash-1 gene product | 6 |
| 633 | 1786037 | (U72284) NADH dehydrogenase subunit 2 [Apis mellifera] | 6 |
| 634 | 2495335 | HEAT SHOCK PROTEIN 42 (42 KD HEAT SHOCK PROTEIN) | 6 |
| | | >gi\|1077219\|pir\|\|S49767 heat shock protein HSP42 - yeast | |
| | | (Saccharomyces cerevisiae) | |
| 635 | 2662541 | (AF036687) contains similarity to protease inhibitors, WAP-type four- | 5.7 |
| | | disulfide core domains and thyroglobulin type-1 repeats | |
| 636 | 118249 | DAUGHTERLESS PROTEIN fly (Drosophila melanogaster) | 5.6 |
| | | >gi\|7839\|emb\|CAA68368\|melanogaster] >gi\|157174 (J03148) | |
| | | daughterless protein | |
| 637 | 2447066 | (U42580) A570L [Paramecium bursaria Chlorella virus 1] | 5.6 |
| 638 | 400927 | RIBONUCLEOPROTEIN RB97D ribonucleoprotein [Drosophila | 4.9 |
| 639 | 121189 | GLUCOSE INHIBITED DIVISION PROTEIN A gidA | 4.8 |
| 640 | 3033398 | (AC004238) putative phosphoribosylaminoimidazolecarboxamide | 4.6 |
| | | formyltransferase [Arabidopsis thaliana] | |
| 641 | 126691 | POSSIBLE MALTASE PRECURSOR (LARVAL VISCERAL | 4.5 |
| | | PROTEIN D) >gi\|103222\|pir\|\|S08597 hypothetical protein D - fruit | |
| | | fly (Drosophila melanogaster) melanogaster] | |
| 642 | 134087 | RETROTRANSPOSABLE ELEMENT SLACS 132 KD PROTEIN | 4.3 |
| | | (ORF2) >gi\|84054\|pir\|\|S14916 hypothetical protein 2 - Trypanosoma | |
| | | brucei gambiense transposon SLACS >gi\|10535\|emb\|CAA34931\| | |
| 643 | 567166 | (L03172) This CDS feature is included to show the translation of the | 3.7 |
| | | corresponding V_region. Presently translation qualifiers on V_region | |
| | | features are illegal | |
| 644 | 4355 | (Z14126) RhoNUC protein [Saccharomyces cerevisiae] | 3.7 |
| 645 | 462679 | MYOSIN IB HEAVY CHAIN heavy chain [Dictyostelium | 3.6 |
| 646 | 1098989 | (U41508) similar to C. elegans proteins C26E6.9A and C26E6.9B; | 2.1 |
| | | weakly similar to malate synthase G | |
| 647 | 3249559 | (AF018261) EH domain binding protein Epsin [Rattus norvegicus] | 2 |
| 648 | 2435594 | (AF026212) No definition line found [Caenorhabditis elegans] | 2 |
| 649 | 995808 | (U32240) Ig heavy chain [Mus musculus] | 2 |
| 650 | 3281870 | (AL031004) putative protein [Arabidopsis thaliana] | 1.8 |
| 651 | 728837 | !!!ALU SUBFAMILY SQ WARNING ENTRY | 1.6 |
| 652 | 1628461 | (Y08775) Men-3 [Silene latifolia] | 1.2 |
| 653 | 483165 | hypothetical protein - Marek's disease virus gammaherpesvirus | 0.93 |
| | | tumorigenicity associated mRNA, two complete cds's.], gene products | |
| | | [Gallid herpesvirus type 1] >gi\|299459\|bbs\|129316 (S58431) CD4 | |
| | | precursor homolog to CD4 and IgM heavy chain [Gallid herpesvir | |
| 654 | 483165 | hypothetical protein - Marek's disease virus gammaherpesvirus | 0.87 |
| | | tumorigenicity associated mRNA, two complete cds's.], gene products | |
| | | [Gallid herpesvirus type 1] >gi\|299459\|bbs\|129316 (S58431) CD4 | |
| | | precursor homolog to CD4 and IgM heavy chain [Gallid herpesvir | |
| 655 | 120359 | RECOMBINASE FLP PROTEIN | 0.71 |
| 656 | 1711563 | STERYL-SULFATASE PRECURSOR (STEROID SULFATASE) | 0.55 |
| | | (STERYL-SULFATE SULFOHYDROLASE) sulfatase [Mus | |
| 657 | 731849 | HYPOTHETICAL 13.5 KD PROTEIN IN MOB1-SGA1 | 0.55 |
| | | INTERGENIC REGION >gi\|626376\|pir\|\|S48473 probable membrane | |
| | | protein YIL100w - yeast (Saccharomyces cerevisiae) | |
| | | >gi\|558707\|emb\|CAA86281\|(Z38125) orf, len: 117, CAI: 0.08, better | |
| 658 | 1669674 | (X86819) Microtubule-associated protein 4 | 0.3 |
| 659 | 2493735 | SKD3 PROTEIN SKD3 [Mus musculus] | 0.25 |
| 660 | 110030 | homeotic protein Hox 5.1 - mouse | 0.19 |
| 661 | 1947160 | (AF000298) weak similarity to collagens; glycine- and proline-rich | 0.012 |
| | | [Caenorhabditis elegans] | |
| 662 | 4567275 | (AC006841) hypothetical protein [Arabidopsis thaliana] | 0.005 |
| 663 | 2677676 | (AC002467) DRA protein (down-regulated in adenoma); sulfate | 4e−056 |
| | | transporter; match to P40879 (PID:g729367) [Homo sapiens] | |
| 671 | 345474 | hypothetical protein 2 - Mediterranean fruit fly | 9.4 |
| | | >gi\|5977\|emb\|CAA49660\|(X70053) unknown [Ceratitis capitata] | |
| 672 | 4538951 | (AL049488) putative protein [Arabidopsis thaliana] | 9.1 |
| 673 | 1749646 | (D89219) unnamed protein product | 7 |
| 674 | 320302 | ORF X protein - human papillomavirus type 41 | 5.5 |
| 675 | 267288 | REPLICATION PROTEIN E1 papillomavirus (type 1) | 5.4 |
| | | >gi\|61013\|emb\|CAA44657\|(X62844) E1 [Pygmy chimpanzee | |
| 676 | 3581899 | (AL031543) hypothetical serine-rich protein [Schizosaccharomyces | 4.2 |
| 677 | 3881119 | (AL032653) predicted using Genefinder; cDNA EST EMBL:D36367 | 4.2 |
| | | comes from this gene; cDNA EST yk408c12.5 comes from this gene | |
| | | [Caenorhabditis elegans] | |
| 678 | 1169663 | TRANSCRIPTIONAL ACTIVATOR FE6S APP interacting protein | 4 |
| | | [Rattus rattus] | |
| 679 | 1565257 | (X57108) cerebroside sulfate activator | 3.2 |
| 680 | 3093358 | (AJ005559) SPR2A protein [Mus musculus] | 1.1 |
| 681 | 1763113 | (U71019) NADH dehydrogenase subunit F [Arrhenatherum elatius] | 0.6 |
| 682 | 3548791 | (AC005620) R33590_1 [Homo sapiens] | 0.46 |
| 683 | 4567275 | (AC006841) hypothetical protein [Arabidopsis thaliana] | 0.025 |
| 684 | 3882311 | (AB018338) KIAA0795 protein [Homo sapiens] | 7e−017 |
| 687 | 2443342 | (D88764) alpha 2 type I collagen [Rana catesbeiana] | 5.1 |
| 688 | 220464 | (D00232) E3 anti-[4-hydroxy-3-nitrophenyl(phenolate + phenolic | 6.4 |
| | | form)]acetyl mAb V-L region [Mus musculus] | |
| 689 | 1351502 | HYPOTHETICAL PROTEIN MG181 Mycoplasma genitalium | 2.1 |
| | | (SGC3) >gi\|3844777 (U39697) conserved hypothetical protein | |
| 693 | 250891 | (S39392) protein tyrosine phosphatase, PTPase | 4.6 |
| 695 | 3323042 | (AE001245) sugar ABC transporter, periplasmic binding protein | 5.8 |
| | | (msmE) [Treponema pallidum] | |
| 696 | 1001741 | (D64004) hypothetical protein | 2.7 |
| 697 | 1169288 | DIHYDROXYACETONE KINASE (GLYCERONE KINASE) | 3e−010 |
| | | >gi\|493083 (U09771) dihydroxyacetone kinase | |
| 698 | 1169288 | DIHYDROXYACETONE KINASE (GLYCERONE KINASE) | 3e−010 |
| | | >gi\|493083 (U09771) dihydroxyacetone kinase | |
| 699 | 3879530 | (Z49130) cDNA EST yk486b9.3 comes from this gene; cDNA EST | 7e−005 |
| | | yk486b9.5 comes from this gene | |
| 700 | 2191127 | (AF007269) A_IG002N01.1 gene product [Arabidopsis thaliana] | 0.0004 |
| 701 | 4504923 | keratin, hair, acidic, 2 type I intermediate filament [Homo sapiens] | 1.5 |
| 702 | 2633756 | (Z99111) similar to heavy metal-transporting ATPase [Bacillus | 7.4 |
| 703 | 3876796 | (Z81531) F36D3.6 [Caenorhabditis elegans] | 7.3 |
| 705 | 123299 | HOMEOBOX PROTEIN HOX-D4 (HOX-4B) protein Hox D4 - | 2.4 |
| | | human >gi\|296652\|emb\|CAA35237\|(X17360) hox 5.1 protein [Homo | |
| 706 | 99899 | DNA-directed RNA polymerase (EC 2.7.7.6) largest chain (isoform | 0.83 |
| | | C) - soybean (fragment) polymerase [Glycine max] | |
| 707 | 4263788 | (AC006068) hypothetical protein | 0.28 |
| 708 | 500858 | (D14168) 50 kDa lectin [Bombyx mori] | 4e−011 |
| 711 | 142283 | (M30318) put. periplasmic receptor protein (chvE); putative | 9.2 |
| | | [Agrobacterium tumefaciens] | |
| 712 | 4502949 | collagen, type II, alpha 1 congenital) | 6.9 |
| | | >gi\|115287\|sp\|P02458\|CA12_HUMAN PROCOLLAGEN ALPHA | |
| | | 1(II) CHAIN PRECURSOR [CONTAINS: CHONDROCALCIN]1- | |
| 713 | 4539163 | (AL049485) putative phytoene synthase | 0.81 |
| 715 | 4056437 | (AC005990) Strong similarity to PFAM PF\|00069 Eukaryotic protein | 2.3 |
| | | kinase domain. [Arabidopsis thaliana] | |
| 716 | 119296 | ELASTIN PRECURSOR (TROPOELASTIN) gallus] | 1.3 |
| 717 | 4226073 | (AF125443) contains similarity to S. pombe phosphatidyl synthase | 8e−016 |
| | | (GB:Z28295) [Caenorhabditis elegans] | |
| 719 | 2498761 | PEROXISOMAL MEMBRANE PROTEIN PMP30A protein - yeast | 1.3 |
| | | (Candida boidinii) >gi\|457391 (L27999) peroxisomal membrane | |
| | | protein 31 [Candida boidinii] | |
| 720 | 3914963 | SECRETORY CARRIER-ASSOCIATED MEMBRANE PROTEIN | 0.58 |
| | | 3 >gi\|2232237 (AF005036) secretory carrier membrane protein [Mus | |
| 721 | 4457204 | (AF108226) immunoglobulin mu heavy chain precursor | 0.15 |
| | | [Monodelphis domestica] | |
| 722 | 3860573 | (AJ235270) unknown [Rickettsia prowazekii] | 4.9 |
| 723 | 2829912 | (AC002291) SimilarATP-dependent RNA Helicase | 0.0002 |
| 724 | 2130573 | (U96771) putative polygalacturonase [Prevotella bryantii] | 6.1 |
| 725 | 539244 | hypothetical protein YKR028w - yeast | 6.1 |
| 726 | 2633502 | (Z99110) similar to hypothetical proteins from B. subtilis [Bacillus | 4.7 |
| 728 | 1078087 | hypothetical protein YLR424w - yeast | 1.6 |
| 729 | 4240219 | (AB020672) KIAA0865 protein [Homo sapiens] | 2 |
| 732 | 3165370 | (AB011874) alpha subunit of dinitrogenase reductase (Fe protein) | 9.3 |
| | | [unidentified nitrogen-fixing bacteria] | |
| 733 | 3882195 | (AB018280) KIAA0737 protein [Homo sapiens] | 2e−061 |
| 735 | 3859938 | (AB081101) reverse transcriptase [Lymantria dispar] | 2.3 |
| 737 | 974143 | (L42542) RLIP76 protein [Homo sapiens] | 8.4 |
| 738 | 3877493 | (Z48583) similar to ATPases associated with various cellular | 3e−047 |
| | | activities (AAA); cDNA EST EMBL:Z14623 comes from this gene; | |
| | | cDNA EST EMBL:D75090 comes from this gene; cDNA EST | |
| | | EMBL:D72255 comes from this gene; cDNA EST yk200e4.5... | |
| 739 | 4240235 | (AB020680) KIAA0873 protein [Homo sapiens] | 3e−052 |
| 740 | 4191810 | (AB006532) DNA helicase [Homo sapiens] | 1e−065 |
| 741 | 4507851 | reserved protease [Homo sapiens] | 2e−071 |
| 742 | 3876797 | (Z81531 cDNA EST EMBL:D66579 comes from this gene; cDNA | 2.7 |
| | | EST EMBL:D70408 comes from this gene; cDNA EST yk263d3.5 | |
| | | comes from this gene; cDNA EST yk275c1.5 comes from this gene; | |
| | | cDNA EST EMBL:C10270 comes from this gene [Caenorh... | |
| 743 | 4376875 | (AE001642) CT465 hypothetical protein | 0.53 |
| 744 | 91305 | sperm mitochondrial capsule selenoprotein - mouse | 0.32 |
| 745 | 1938549 | (U97016) similar to drosophila Rlc1 gene product ribosomal protein | 9e−016 |
| | | L4 (YML4) (NID:g459259) | |
| 751 | 3882189 | (AB018277) KIAA0734 protein [Homo sapiens] | 7.8 |
| 752 | 505665 | (U08023) novel cellular proto-oncogene [Homo sapiens] | 7.8 |
| 753 | 3170498 | (AF052872) APETALA3 homolog PcAP3 [Papaver californicum] | 6 |
| 754 | 1082243 | autotaxin precursor - human >gi\|537906 | 2.6 |
| 755 | 4507721 | titin >gi\|1212992\|emb\|CAA62188\|via Swiss-Prot; available at | 1.5 |
| | | present via e-mail from LABEIT@EMBL-Heidelberg.DE [Homo | |
| 756 | 3036883 | (AL022374) putative ABC transporter | 0.68 |
| 757 | 543593 | hypothetical 39.8 K protein (clone GV-B) - garlic virus B | 0.06 |
| 758 | 79960 | hypothetical 30.5 K protein - Enterococcus faecalis plasmid pAM-beta- | 1e−024 |
| | | 1 >gi\|3023044 (AF007787) orfC | |
| 759 | 3882195 | (AB018280) KIAA0737 protein [Homo sapiens] | 6e−060 |
| 766 | 1707719 | (Y08256) orf c02007 [Sulfolobus solfataricus] | 9.8 |
| 767 | 2133808 | immunoglobulin heavy chain - nurse shark | 7.6 |
| 768 | 1469880 | (D63483) The KIAA0149 gene product is related to Notch3. [Homo | 7.5 |
| 769 | 4454062 | (AJ132911) NorD protein [Bradyrhizobium japonicum] | 5.9 |
| 770 | 137532 | PROTEIN C2 >gi\|74386\|pir\|\|WZVZB6 59 K HindIII-C protein - | 4.4 |
| | | vaccinia virus (strain WR) | |
| 771 | 1098985 | (U41031) proline-rich [Caenorhabditis elegans] | 3.4 |
| 772 | 4378891 | (AF132481) Ese1L protein [Mus musculus] | 2.6 |
| 773 | 4557489 | cone-rod homeobox PROTEIN >gi\|2665534 (AF024711) cone rod | 1.5 |
| | | homeobox protein | |
| 774 | 2135894 | peripheral benzodiazepine receptor - human | 0.52 |
| 775 | 477495 | cell-fate determining gene Notch2 protein - rat | 0.51 |
| 776 | 1945493 | (U56965) Similar to NAD(P) transhydrogenase, mitochondrial; coded | 0.39 |
| | | for by C. elegans cDNA yk27c1.5; coded for by C. elegans cDNA | |
| | | yk35b9.5; coded for by C. elegans cDNA yk35b9.3; coded for by C. | |
| | | elegans cDNA yk161c9.3; coded for by C. elegans... | |
| 777 | 746516 | (U23517) D1022.7 [Caenorhabditis elegans] >gi\|3258651 elegans] | 0.059 |
| 778 | 2498786 | GLYCEROL-3-PHOSPHATE ACYLTRANSFERASE | 0.058 |
| | | PRECURSOR (GPAT) (P90) acyltransferase homolog - mouse | |
| | | >gi\|193367 (M77003) glycerol-3-phosphate acyltransferase [Mus | |
| 779 | 2134384 | procKr2 - chicken (fragment) gallus] | 0.015 |
| 780 | 4176500 | (AL031177) dJ889M15.3 (novel protein) | 0.001 |
| 781 | 500858 | (D14168) 50 kDa lectin [Bombyx mori] | 5e−010 |
| 782 | 4204294 | (AC003027) lcl\|prt_seq No definition line found | 3e−010 |
| 783 | 500858 | (D14168) 50 kDa lectin [Bombyx mori] | 2e−010 |
| 784 | 3184082 | (AL023781) N-terminal acetyltransferase 1 | 6e−014 |
| 785 | 3184082 | (AL023781) N-terminal acetyltransferase 1 | 3e−014 |
| 786 | 1330401 | (U58762) T27F7.1 gene product [Caenorhabditis elegans] | 6e−030 |
| 787 | 1330401 | (U58762) T27F7.1 gene product [Caenorhabditis elegans] | 3e−030 |
| 788 | 3879850 | (Z81592) predicted using Genefinder | 8e−034 |
| 789 | 1072198 | (U40942) No definition line found [Caenorhabditis elegans] | 1e−037 |
| 790 | 3327160 | (AB014573) KIAA0673 protein [Homo sapiens] | 1e−062 |
| 791 | 3413886 | (AB007931) KIAA0462 protein [Homo sapiens] | 1e−073 |
| 800 | 1903264 | (Y11824) hypothetical protein [Pisum sativum] | 9.5 |
| 801 | 2739276 | (AJ223176) Ser/Thr protein kinase | 5.6 |
| 802 | 4521264 | (AB015874) guanylate cyclase O1GC-R2 | 5.6 |
| 803 | 2144044 | zinc finger protein AT-BP2 - black rat protein AT-BP2 [Rattus rattus] | 5.5 |
| 804 | 4049682 | (AF063866) ORF MSV092 hypothetical protein [Melanoplus | 4.3 |
| | | sanguinipes entomopoxvirus] | |
| 805 | 2842704 | HYPOTHETICAL 73.3 KD PROTEIN C6G9.14 IN | 3.2 |
| | | CHROMOSOME I >gi\|1644326\|emb\|CAB03616.1\|protein | |
| 806 | 1526981 | (X99945) amino acid permease YeeF like protein [Salmonella | 2.5 |
| 807 | 1082243 | autotaxin precursor - human >gi\|537906 | 2.5 |
| 808 | 3660667 | (AF055079) inositol 1,4,5-trisphosphate receptor | 2.4 |
| 809 | 2500002 | PHOSPHORIBOSYLAMINE-GLYCINE LIGASE | 2.4 |
| | | PHOSPHORIBOSYLFORMYLGLYCINAMIDINE CYCLO- | |
| | | LIGASE (AIRS) synthetase, aminoimidazole ribonucleotide | |
| | | synthetase, glycinamide.ribonucleotide transformylase {EC 6.3.4.13, | |
| | | 6.3.3.1, 2.1.2.2} [Chironomus tentans, Peptide, 1371 aa | |
| 810 | 4507721 | titin >gi\|1212992\|emb\|CAA62188\|via Swiss-Prot; available at | |
| | | present via e-mail from LABEIT@EMBL-Heidelberg.DE [Homo | 1.5 |
| 811 | 4507721 | titin >gi\|1212992\|emb\|CAA62188\|via Swiss-Prot; available at | 1.4 |
| | | present via e-mail from LABEIT@EMBL-Heidelberg.DE [Homo | |
| 812 | 2833215 | INTERFERON-ACTIVATABLE PROTEIN 205 protein - mouse | 1.1 |
| | | >gi\|385703\|bbs\|133592 (S62227) D3=lipopolysaccharide-inducible | |
| | | [mice, macrophages, Peptide, 425 aa] [Mus sp.] | |
| 813 | 1262910 | (U51645) cytidine triphosphate synthetase [Plasmodium falciparum] | 0.64 |
| 814 | 1245061 | (U46069) fertilin alpha subunit [Oryctolagus cuniculus] | 0.005 |
| 815 | 4493746 | (AL034358) predicted using hexExon; L4830.10, Hypothetical | 0.003 |
| | | protein, len: 816 aa [Leishmania major] | |
| 816 | 3283350 | (AF062378) calmodulin-binding protein SHA1 [Mus musculus] | 0.003 |
| 817 | 4204294 | (AC003027) lcl\|prt_seq No definition line found | 3e−006 |
| 818 | 4309681 | (AC006930) R33423_1 [Homo sapiens] | 4e−007 |
| 819 | 3293547 | (AF072709) putative oxidoreductase [Streptomyces lividans] | 5e−013 |
| 820 | 1086900 | (U41278) contains similarity to G beta repeats | 2e−028 |
| 821 | 3878739 | (Z73428) similar to Zinc finger, C3HC4 type (RING finger); cDNA | 6e−031 |
| | | EST EMBL:D67323 comes from this gene [Caenorhabditis elegans] | |
| | | >gi\|3881096\|emb\|CAB16481\|finger); cDNA EST EMBL:D67323 | |
| | | comes from this gene | |
| 822 | 3882195 | (AB018280) KIAA0737 protein [Homo sapiens] | 1e−053 |
| 823 | 3095186 | (AF057140) cargo selection protein TIP47 [Homo sapiens] | 1e−060 |
| 841 | 1915885 | (Y08370) alpha-amylase [Crassostrea gigas] | 9.2 |
| 842 | 1621461 | (U73103) laccase [Liriodendron tulipifera] | 9.2 |
| 843 | 232620 | (S41487) possible ribosomal protein=1(3)S12 Canton S wild type | 9.1 |
| | | [Drosophila melanogaster, Peptide, 73 aa] [Drosophila melanogaster] | |
| 844 | 1731338 | HYPOTHETICAL 73.6 KD PROTEIN CY49.21 | 6.9 |
| | | >gi\|1370248\|emb\|CAA98194\|(Z73966) hypothetical protein Rv2082 | |
| 845 | 3873261 | (AF096295) cytochrome oxidase subunit I [Naja siamensis] | 6.9 |
| 846 | 4049727 | (AF063866) ORF MSV173 putative serine/threonine protein kinase | 5.5 |
| | | Swinepox virus C20L homolog (vaccinia F10L), similar to | |
| | | SW:P32216 [Melanoplus sanguinipes entomopoxvirus] | |
| 847 | 1175595 | HYPOTHETICAL PROTEIN HI1265 | 4.1 |
| 848 | 446631 | collagen:SUBUNIT=alpha2:ISOTYPE=IX [Homo sapiens] | 4.1 |
| 849 | 627171 | odz protein - fruit fly (Drosophila sp.) product=tenascin homolog | 3.2 |
| | | [Drosophila melanogaster, 9- to 12-hour-old embryos, Peptide, 2406 | |
| 850 | 3986440 | (AF076785) serum amyloid A-activating factor SAF-5 | 3.1 |
| 851 | 91312 | stem cell protein ERA-1-399, retinoic acid-induced - mouse | 1.4 |
| | | >gi\|387146 (M22115) ERA-1-399 protein [Mus musculus] | |
| 852 | 4102043 | (AF008203) homeobox protein [Homo sapiens] | 1.3 |
| 853 | 746516 | (U23517) D1022.7 [Caenorhabditis elegans] >gi\|3258651 elegans] | 0.28 |
| 854 | 2935691 | (AF032122) unknown [Streptococcus thermophilus bacteriophage | 0.21 |
| 855 | 99972 | nodule-specific (hydroxy) proline-rich protein | 0.014 |
| 856 | 1169288 | DIHYDROXYACETONE KINASE (GLYCERONE KINASE) | 1e−005 |
| | | >gi\|493083 (U09771) dihydroxyacetone kinase | |
| 857 | 3721912 | (AB017156) gob-5 [Mus musculus] | 1e−011 |
| 858 | 868241 | (U29488) C56C10.3 gene product [Caenorhabditis elegans] | 3e−012 |
| 859 | 3293547 | (AF072709) putative oxidoreductase [Streptomyces lividans] | 5e−013 |
| 860 | 2228750 | (U93868) RNA polymerase III subunit [Homo sapiens] | 1e−015 |
| 861 | 1175412 | HYPOTHETICAL 24.2 KD PROTEIN C13A11.03 IN | 5e−021 |
| | | CHROMOSOME I >gi\|984224\|emb\|CAA90804\| | |
| 883 | 4505413 | non-metastatic cells 5, protein expressed in (nucleoside-diphosphate | 9 |
| | | kinase) KINASE HOMOLOG 5 (NDK-H 5) (NDP KINASE | |
| | | HOMOLOG 5) nucleoside-diphosphate kinase [Homo sapiens] | |
| 884 | 3308984 | (AB008516) mtprd [Mus musculus] | 9 |
| 885 | 3273643 | (AF042021) olfactory receptor [Sus scrofa] | 9 |
| 886 | 1170338 | HETEROCHROMATIN PROTEIN 1 HOMOLOG ALPHA (HP1 | 9 |
| | | ALPHA) (ANTIGEN P25) >gi\|184311 (L07515) complete cds.], | |
| | | gene product [Homo sapiens] chromosomal autoantigen [human, | |
| 887 | 1125745 | (U42832) coded for by C. elegans cDNA yk107c8.5; coded for by C. | 6.9 |
| | | elegans cDNA yk107c8.3; Similar to UDP-glucuronosyltransferase. | |
| | | [Caenorhabditis elegans] | |
| 888 | 2921102 | (AF020337) P6 [rice ragged stunt virus] | 6.9 |
| 889 | 1707199 | (U80841) C13A10.1 gene product [Caenorhabditis elegans] | 6.8 |
| 890 | 1125745 | (U42832) coded for by C. elegans cDNA yk107c8.5; coded for by C. | 5.3 |
| | | elegans cDNA yk107c8.3; Similar to UDP-glucuronosyltransferase. | |
| | | [Caenorhabditis elegans] | |
| 891 | 2493564 | PUTATIVE RIBOFLAVIN BIOSYNTHESIS ENZYME | 5.2 |
| | | >gi\|1707704\|emb\|CAA69508\|(Y08256) riboflavin biosynthesis | |
| | | protein ribG [Sulfolobus solfataricus] | |
| 892 | 2276148 | (Z81463) Similarity to C.elegans zinc finger proteins [Caenorhabditis | 5.2 |
| 893 | 1346425 | L-LACTATE DEHYDROGENASE 1.1.1.27) - Mycoplasma | 5.2 |
| | | genitalium (SGC3) >gi\|1046180 | |
| 894 | 4234795 | (AF078135) unknown [Leptospira borgpetersenii] | 5.2 |
| 895 | 3874963 | (Z92780) cDNA EST EMBL:D75953 comes from this gene | 4 |
| | | [Caenorhabditis elegans] | |
| 896 | 3875723 | (Z54270) similar to membrane glycoprotein | 3.9 |
| 897 | 1086593 | (U41007) C33H5.15 gene product [Caenorhabditis elegans] | 3.9 |
| 898 | 3289979 | (AC005263) SP62_HUMAN; SAP 62; SF3A66 [Homo sapiens] | 3.1 |
| 899 | 2208965 | (Y10528) cyanide insensitive terminal oxidase [Pseudomonas | 3 |
| 900 | 4539386 | (AL035526) extensin-like protein | 1.8 |
| 901 | 2662561 | (AF036692) Similar to seven transmembrane receptor | 1.8 |
| 902 | 2129184 | pheromone shutdown protein homolog - Methanococcus jannaschii | 1.3 |
| | | >gi\|592009 (U67576) pheromone shutdown protein (traB) | |
| | | [Methanococcus jannaschii] | |
| 903 | 2317864 | (U78289) tylactone synthase module 7 [Streptomyces fradiae] | 0.61 |
| 904 | 3808242 | (AF069669) pol protein [Human immunodeficiency virus type 1] | 0.6 |
| 905 | 3327128 | (AB014557) KIAA0657 protein [Homo sapiens] | 0.46 |
| 906 | 294529 | (L14933) convertase PC5 [Rattus norvegicus] | 0.35 |
| 907 | 3005087 | (AF044924) hook2 protein [Homo sapiens] | 0.12 |
| 908 | 3297817 | (AL031032) putative protein [Arabidopsis thaliana] | 0.025 |
| 909 | 3941342 | (AF043250) mitochondrial outer membrane protein [Homo sapiens] | 0.01 |
| | | >gi\|3941347 (AF043253) mitochondrial outer membrane protein | |
| | | [Homo sapiens] >gi\|4105703\|gb\|AAD02504\| | |
| 910 | 480989 | finger protein rfp - mouse (fragment) | 5e−006 |
| 911 | 2842526 | (AL021746) hypothetical anaphase promoting factor component | 3e−018 |
| | | [Schizosaccharomyces pombe] anaphase promoting complex | |
| 912 | 4226073 | (AF125443) contains similarity to S. pombe phosphatidyl synthase | 4e−022 |
| | | (GB:Z28295) [Caenorhabditis elegans] | |
| 913 | 3551821 | (AF058803) mucin 4 [Homo sapiens] | 3e−038 |
| 914 | 3882195 | (AB018280) KIAA0737 protein [Homo sapiens] | 4e−051 |
| 940 | 279539 | RNA-directed RNA polymerase (EC 2.7.7.48) - Marburg virus (strain | 8.7 |
| | | Musoke) >gi\|332179 (M92834) L Protein [Marburg virus] | |
| 941 | 117865 | CYTOCHROME B >gi\|2144288\|pir\|\|H22848 ubiquinol-cytochrome- | 8.6 |
| | | c reductase (EC 1.10.2.2) cytochrome b - Sauroleishmania tarentolae | |
| 942 | 3764008 | (AL008970) predicted using hexExon; MAL3P4.10 (PFC0515c), | 8.6 |
| | | Hypothetical protein, len: 1237 aa | |
| 943 | 3649770 | (Z98547) predicted using hexExon; MAL3P3.11 (PFC0380w), Dual- | 6.5 |
| | | specificity protein phosphatase, len: 581 aa; Similarity to protein | |
| | | phosphatases. S.cerevisiae protein-tyrosine phosphatase YVH1 | |
| | | (SW:PVH1_YEAST) BLAST Score: 123, s... | |
| 944 | 1125745 | (U42832) coded for by C. elegans cDNA yk107c8.5; coded for by C. | 5.1 |
| | | elegans cDNA yk107c8.3; Similar to UDP-glucuronosyltransferase. | |
| | | [Caenorhabditis elegans] | |
| 945 | 2208965 | (Y10528) cyanide insensitive terminal oxidase [Pseudomonas | 5 |
| 946 | 2146997 | L-selectin precursor - rabbit >gi\|847788 | 5 |
| 947 | 135091 | ALANYL-TRNA SYNTHETASE (ALANINE-TRNA LIGASE) | 3.8 |
| | | (ALARS) >gi\|95227\|pir\|\|S16897 alanine-tRNA ligase (EC 6.1.1.7) - | |
| | | Rhizobium leguminosarum bv. viciae synthetase [Rhizobium | |
| 948 | 1171815 | NADH-UBIQUINONE OXIDOREDUCTASE CHAIN 4 | 3.8 |
| | | >gi\|102585\|pir\|\|S26021 NADH dehydrogenase mitochondrion | |
| | | (SGC4) >gi\|559495\|emb\|CAA38170\|(X54253) ND4 protein [Ascaris | |
| 949 | 2120034 | glycoprotein B homolog precursor - feline herpesvirus 1 | 1.7 |
| | | >gi\|261095\|bbs\|120003 (S49775) glycoprotein B homolog [feline | |
| | | herpesvirus type 1 FHV-1, Peptide, 948 aa] [Feline herpesvirus 1] | |
| 950 | 4507539 | UNKNOWN >gi\|2587054 (AF027204) putative tetraspan | 0.99 |
| | | transmembrane protein L6H [Homo sapiens] | |
| 951 | 417237 | CHEMOTAXIS LAFT PROTEIN parahaemolyticus >gi\|677909 | 0.26 |
| | | (U20541) LafT [Vibrio parahaemolyticus] >gi\|1518953 (U52957) | |
| 952 | 3798624 | (AF082100) FK506 polyketide synthase [Streptomyces sp. MA6548] | 0.12 |
| 953 | 4493746 | (AL034358) predicted using hexExon; L4830.10, Hypothetical | 0.003 |
| | | protein, len: 816 aa [Leishmania major] | |
| 954 | 1175412 | HYPOTHETICAL 24.2 KD PROTEIN C13A11.03 IN | 6e−014 |
| | | CHROMOSOME I >gi\|984224\|emb\|CAA90804\| | |
| 955 | 4240235 | (AB020680) KIAA0873 protein [Homo sapiens] | 8e−044 |
| 976 | 1350599 | RIBONUCLEOSIDE-DIPHOSPHATE REDUCTASE ALPHA | 8.2 |
| | | CHAIN (RIBONUCLEOTIDE REDUCTASE) reductase (EC | |
| | | 1.17.4.1) - Mycoplasma genitalium (SGC3) reductase, alpha chain | |
| 977 | 731840 | HYPOTHETICAL 23.9 KD PROTEIN IN SGA1-KTR7 | 6.4 |
| | | INTERGENIC REGION >gi\|1077785\|pir\|\|S49791 probable | |
| | | membrane protein YIL089w - yeast (Saccharomyces cerevisiae) | |
| | | >gi\|577125\|emb\|CAA86705.1\|(Z46728) YI9910.07, unknown orf, | |
| 978 | 2132436 | probable membrane protein YDL118w - yeast | 6.3 |
| 979 | 1710518 | 60S RIBOSOMAL PROTEIN L22 homologue to human L22 | 6.3 |
| 980 | 3602956 | (AF041468) rbcR homolog [Guillardia theta] | 4.9 |
| 981 | 2146997 | L-selectin precursor - rabbit >gi\|847788 | 4.8 |
| 982 | 3880890 | (AL023838) predicted using Genefinder; similar to Helix-hairpin- | 4.8 |
| | | helix motif.; cDNA EST yk241d12.5 comes from this gene; cDNA | |
| | | EST yk401c3.5 comes from this gene; cDNA EST CEMSE47F | |
| | | comes from this gene [Caenorhabditis elegans] | |
| 983 | 3880727 | (AL032632) predicted using Genefinder | 2.8 |
| 984 | 1352547 | NADH-UBIQUINONE OXIDOREDUCTASE CHAIN 2 | 2.2 |
| | | >gi\|2147757\|pir\|\|S62766 NADH dehydrogenase caldarium) | |
| | | mitochondrion (fragment) subunit 2 [Cyanidium caldarium] | |
| 985 | 3551845 | (AF071879) capsid protein [Porcine circovirus] | 2.1 |
| 986 | 3249009 | (AF068139) S5 ribosomal protein/maturase fusion protein | 2.1 |
| | | [Cryphonectria parasitica] | |
| 987 | 1707126 | (U80454) T16A1.2 [Caenorhabditis elegans] | 2.1 |
| 988 | 1497971 | (U55797) VP6 [Bluetongue virus] | 1.7 |
| 989 | 3877568 | (Z70208) similar to collagen | 0.97 |
| 990 | 3309543 | (AF036382) MLL [Fugu rubripes] | 1e−005 |
| 991 | 4240235 | (AB020680) KIAA0873 protein [Homo sapiens] | 2e−039 |
| 1015 | 3257605 | (AP000005) 484aa long hypothetical protein | 8.2 |
| 1016 | 37593 | (X57019) unnamed protein product [Homo sapiens] | 8.1 |
| | | >gi\|238775\|bbs\|65126 (S65125) putative tyrosine kinase | |
| | | receptor=UFO [human, NIH3T3, Peptide, 894 aa] | |
| 1017 | 746533 | (U23520) similar to cuticular collagen [Caenorhabditis elegans] | 8 |
| 1018 | 729045 | BETA CASEIN PRECURSOR scrofa] | 7.9 |
| 1019 | 1170463 | INTERLEUKIN-1 BETA CONVERTASE PRECURSOR (IL-1BC) | 7.8 |
| | | (IL-1 BETA CONVERTING ENZYME) (ICE) converting enzyme | |
| 1020 | 1197641 | (U46859) DdhB [Yersinia enterocolitica (type 0:8)] | 6 |
| 1021 | 2104691 | (U92794) alpha glucosidase II, beta subunit [Mus musculus] | 4.7 |
| 1022 | 1139577 | (D63706) Orf5 [Streptomyces griseus] | 4.7 |
| 1023 | 136785 | EARLY GLYCOPROTEIN GP48 PRECURSOR glycoprotein (18) | 3.5 |
| | | [human herpesvirus 5] | |
| 1024 | 1314757 | (U54761) phosphoglucose isomerase [Erwinia amylovora] | 2.6 |
| 1025 | 2497383 | PUTATIVE TRANSPOSASE FOR INSERTION SEQUENCE IS408 | 1.6 |
| | | >gi\|309869 (L09108) IS408 transposase; putative [Pseudomonas | |
| | | cepacia] >gi\|1097384\|prf\|\|2113421C transposase [Burkholderia | |
| 1026 | 1346281 | CHITOOLIGOSACCHARIDOLYTIC BETA-N- | 0.7 |
| | | ACETYLGLUCOSAMINIDASE PRECURSOR (BETA- | |
| | | GLCNACASE) 3.2.1.-) - silkworm >gi\|998377\|bbs\|165703 (S77548) | |
| | | chitooligosaccharidolytic beta-N-acetylglucosaminidase, beta- | |
| 1027 | 3121722 | ALPHA-1D ADRENERGIC RECEPTOR (ALPHA 1D- | 0.18 |
| | | ADRENOCEPTOR) (ALPHA-1A ADRENERGIC RECEPTOR) | |
| | | receptor [mice, brain, Peptide, 562 aa] [Mus sp.] | |
| 1028 | 4071321 | (AF073954) Y-box protein MSY2 [Mus musculus] | 0.14 |
| 1029 | 1293835 | (U56965) C15H9.5 gene product [Caenorhabditis elegans] | 0.11 |
| 1030 | 2822157 | (AC004084) similar to GTPase-activating proteins; 35% similar to | 2e−013 |
| | | JC5047 (PID:g2136083) [Homo sapiens] | |
| 1040 | 1877301 | (Z92774) hypothetical protein Rv3570c | 9.7 |
| 1041 | 3024629 | GAMMA-SOLUBLE NSF ATTACHMENT PROTEIN (SNAP- | 7.8 |
| | | GAMMA) >gi\|423252\|pir\|\|S32369 gamma-SNAP protein - bovine | |
| | | >gi\|298669\|bbs\|127528 gamma soluble NSF attachment protein, | |
| | | gamma SNAP=N-ethyl-maleimide-sensitive fusion protein attachment | |
| 1042 | 731044 | UBIQUITIN CARBOXYL-TERMINAL HYDROLASE 7 | 7.6 |
| | | (UBIQUITIN THIOLESTERASE 7) probable membrane protein | |
| | | YIL156w - yeast (Saccharomyces cerevisiae) | |
| | | >gi\|557767\|emb\|CAA86122\|(Z38059) orf, len: 1071, CAI: 0.13, | |
| 1043 | 2190592 | (U78315) Hermansky-Pudlak syndrome protein homolog [Mus | 4.3 |
| 1044 | 2627435 | (AF013614) No definition line found [Fugu rubripes] | 3.5 |
| 1045 | 3881166 | (AL032641) Y5F2A.3 [Caenorhabditis elegans] | 2 |
| 1046 | 729918 | LA PROTEIN HOMOLOG (LA RIBONUCLEOPROTEIN) (LA | 0.009 |
| | | AUTOANTIGEN HOMOLOG) | |
| 1047 | 4106562 | (Z83819) dJ146H21.2 (similar to CYTOCHROME B-245 HEAVY | 3e−017 |
| | | CHAIN) [Homo sapiens] | |
| 1048 | 4557535 | down-regulated in adenoma protein down-regulated in adenoma | 4e−026 |
| | | (DRA) - human >gi\|291964 576-580, 579-583; acidic transcr. activ. | |
| | | domain 620-640,; homeobox motif 653-676 [Homo sapiens] | |
| 1049 | 4240235 | (AB020680) KIAA0873 protein [Homo sapiens] | 1e−037 |
| 1050 | 4240235 | (AB020680) KIAA0873 protein [Homo sapiens] | 2e−056 |
| 1065 | 586240 | VITAMIN K-DEPENDENT GAMMA-CARBOXYLASE (GAMMA- | 9.6 |
| | | GLUTAMYL CARBOXYLASE) 4.1.1.-) - bovine >gi\|289399 | |
| | | (L09726) gamma-carboxylase | |
| 1066 | 3413410 | (AL031231) 30S ribosomal protein S15 | 7.4 |
| 1067 | 1170758 | GALECTIN-3 (GALACTOSE-SPECIFIC LECTIN 3) (MAC-2 | 7.4 |
| | | ANTIGEN) (IGE-BINDING PROTEIN) (35 KD LECTIN) | |
| | | (CARBOHYDRATE BINDING PROTEIN 35) (CBP 35) | |
| 1068 | 867985 | (L39002) S1 gene product [Avian orthoreovirus] orthoreovirus] | 7.4 |
| 1069 | 127494 | METALLOTHIONEIN (MT) lucius] >gi\|62783\|emb\|CAA49636\| | 7.3 |
| | | (X70042) Metallothioein | |
| 1070 | 3150259 | (AL023634) palmitoyl-protein thioesterase precursor | 5.7 |
| | | [Schizosaccharomyces pombe] | |
| 1071 | 328647 | (M81729) tat [Human immunodeficiency virus type 1] | 4.3 |
| 1072 | 2605979 | (AF030027) 35 [Equine herpesvirus 4] | 3.3 |
| 1073 | 137532 | PROTEIN C2 >gi\|74386\|pir\|\|WZVZB6 59K HindIII-C protein - | 3.3 |
| | | vaccinia virus (strain WR) | |
| 1074 | 3769620 | (AF091563) olfactory receptor [Rattus norvegicus] | 3.3 |
| 1075 | 687367 | (U15829) envelope glycoprotein V3-V5 loop region [Human | 1.4 |
| | | immunodeficiency virus type 1] | |
| 1076 | 3915901 | TRANSCRIPTION INITIATION FACTOR TFIID 60 KD | 0.48 |
| | | SUBUNIT (TAFII-60) (TAFII60) | |
| 1077 | 2317934 | (U97553) unknown [murine herpesvirus 68] | 0.37 |
| 1080 | 3878966 | (Z68009) R09A8.1 [Caenorhabditis elegans] | 9.1 |
| 1081 | 2341037 | (AC000104) F19P19.17 [Arabidopsis thaliana] | 2.3 |
| 1084 | 4508019 | zinc finger protein 231 protein [Homo sapiens] | 8.9 |
| 1085 | 3877198 | (Z69903) predicted using Genefinder; Similarity to Rat casein kinase | 4 |
| | | I (SW:KC1D_RAT); cDNA EST EMBL:D65322 comes from this | |
| | | gene; cDNA EST EMBL:D68704 comes from this gene; cDNA EST | |
| | | yk475f2.5 comes from this gene [Caenorhabditis... | |
| 1086 | 171998 | (J02691) mitochondrial phenylalanyl-tRNA synthetase alpha subunit | 2.3 |
| | | precursor [Saccharomyces cerevisiae] | |
| 1087 | 135574 | LARGE TEGUMENT PROTEIN BPLF1 reading frame, 1 NXT/S, | 0.77 |
| | | analogous to VZV RF22 BPLF1 [Human herpesvirus 4] | |
| 1091 | 1718312 | (U75698) ORF K10 [Kaposi's sarcoma-associated herpesvirus] | 9.8 |
| 1092 | 1076012 | stress-sensitive restriction system protein 2 - Corynebacterium | 7.5 |
| | | glutamicum (ATCC 13032) >gi\|549844 restriction endonuclease | |
| | | which is stress-sensitive and ATP-dependent. It contains a typical | |
| 1093 | 882341 | (U24702) LRP1 [Arabidopsis thaliana] | 0.71 |
| 1094 | 3955011 | (AJ005438) beta adrenoreceptor B | 0.54 |
| 1095 | 1086900 | (U41278) contains similarity to G beta repeats | 1e−028 |
| 1096 | 4519908 | (AB018106) HrSmad1/5 [Halocynthia roretzi] | 6 |
| 1097 | 3043868 | (U95835) extracellular protein Exp5 precursor | 5.9 |
| 1098 | 2494294 | NEUROGENIC LOCUS NOTCH 3 PROTEIN | 3.5 |
| 1099 | 3879748 | (Z72514) predicted using Genefinder; similar to collagen; cDNA | 0.079 |
| | | EST EMBL:M89258 comes from this gene; cDNA EST | |
| | | EMBL:D68856 comes from this gene; cDNA EST yk232e11.3 comes | |
| | | from this gene; cDNA EST yk232e11.5 comes from this gene;... | |
| 1100 | 1123087 | (U42436) C49H3.3 gene product [Caenorhabditis elegans] | 5e−006 |
| 1101 | 3880809 | (AL021483) similar to Probable rabGAP domains; cDNA EST | 3e−011 |
| | | EMBL:D34945 comes from this gene; cDNA EST EMBL:D27313 | |
| | | comes from this gene; cDNA EST EMBL:D34829 comes from this | |
| | | gene; cDNA EST EMBL:D27312 comes from this gene; cDNA | |
| 1105 | 1772652 | (U70664) 2-keto-3-deoxygluconate kinase [Haloferax alicantei] | 5.8 |
| 1106 | 113000 | ACTIN BINDING PROTEIN | 5.5 |
| 1107 | 2702276 | (AC003033) putative beta-glucosidase [Arabidopsis thaliana] | 4.2 |
| 1108 | 1504006 | (D86966) similarto human ZFY protein. [Homo sapiens] | 4.2 |
| 1109 | 2337833 | (Z98604) hypothetical protein MLCB2052.27 | 1.8 |
| 1110 | 3122952 | TIPD PROTEIN >gi\|2407788 (AF019236) TipD [Dictyostelium | 6e−019 |
| 1112 | 4049344 | (AL034567) putative protein [Arabidopsis thaliana] | 6.8 |
| 1113 | 2143767 | glycoprotein - rat >gi\|986943 (L08134) glycoprotein [Rattus | 0.018 |
| | | norvegicus] norvegicus] | |
| 1116 | 200135 | (M63849) 2′- 5′oligoadenylate synthetase [Mus musculus] | 7.9 |
| 1119 | 133135 | MITOCHONDRIAL RIBOSOMAL PROTEIN VAR1 1-339) | 9.7 |
| 1120 | 1580768 | (X92688) NADH dehydrogenase [Pecten maximus] | 4.4 |
| 1121 | 4587868 | (AF069302) Orf2 [Pediococcus pentosaceus] | 1.5 |
| 1123 | 3851496 | (AF051933) cyclin T; positive elongation transcription factor b cyclin | 3.4 |
| | | subunit [Drosophila melanogaster] | |
| 1131 | 3877133 | (Z83109) predicted using Genefinder | 6 |
| 1132 | 118864 | DNA POLYMERASE (A PROTEIN) 2.7.7.7) - ground squirrel | 4.6 |
| | | hepatitis virus >gi\|325402 | |
| 1133 | 415638 | (U03388) cyclooxygenase 1 [Rattus rattus] | 4.5 |
| 1134 | 4100099 | (U93502) hypothetical protein 256 [Secale cereale] | 2.7 |
| 1135 | 2130154 | hypothetical protein 241 - maize chloroplast | 1.2 |
| 1136 | 4521280 | (AB011832) cytochrome c oxidase subunit I [Dicyema misakiense] | 0.94 |
| 1137 | 2706875 | (D85084) NCAM-180 [Cynops pyrrhogaster] | 0.68 |
| 1138 | 746516 | (U23517) D1022.7 [Caenorhabditis elegans] >gi\|3258651 elegans] | 0.061 |
| 1139 | 746516 | (U23517) D1022.7 [Caenorhabditis elegans] >gi\|3258651 elegans] | 0.061 |
| 1140 | 1938549 | (U97016) similar to drosophila Rlc1 gene product ribosomal protein | 5e−017 |
| | | L4 (YML4) (NID:g459259) | |
| 1141 | 1938549 | (U97016) similar to drosophila Rlc1 gene product ribosomal protein | 3e−017 |
| | | L4 (YML4) (NID:g459259) | |
| 1142 | 3851703 | (AF100421) p80 [Rattus norvegicus] | 1e−056 |
| 1143 | 4191810 | (AB006532) DNA helicase [Homo sapiens] | 8e−066 |
| 1144 | 3851703 | (AF100421) p80 [Rattus norvegicus] | 8e−070 |
| 1163 | 82620 | probable serine-type carboxypeptidase (EC 3.4.16.1) - wheat | 9.7 |
| 1164 | 3879471 | (Z69885) predicted using Genefinder | 9.6 |
| 1165 | 1075011 | mercury resistance regulatory protein KW20) | 9.5 |
| 1166 | 4490715 | (AL035680) putative protein [Arabidopsis thaliana] | 9.3 |
| 1167 | 487418 | (L20303) actin filament-associated protein [Gallus gallus] | 7.6 |
| 1168 | 560610 | trypsin inhibitor, WTI [Triticum aestivum=wheat, variety San | 7.5 |
| | | Pastore, endosperm, Peptide, 71 aa] | |
| 1169 | 3322954 | (AE001240) spermidine/putrescine ABC transporter, permease | 7.5 |
| | | protein (potB) [Treponema pallidum] | |
| 1170 | 1707179 | (U80839) ZC204.15 gene product [Caenorhabditis elegans] | 7.4 |
| 1171 | 209619 | (J01901) major coat protein A [Adeno associated virus 2] | 7.3 |
| 1172 | 1657233 | (D88529) serine acetyltransferase serine acetyltransferase [Spinacia | 7.3 |
| 1173 | 722375 | (U23139) similar to phospholipase ADRAB-B precursor | 7.2 |
| 1174 | 138018 | TAIL FIBER PROTEIN GP37 (RECEPTOR RECOGNIZING | 5.5 |
| | | PROTEIN) >gi\|76090\|pir\|\|TLBP74 tail fiber protein gp37 - phage T4 | |
| | | >gi\|15374\|emb\|CAA24228\|(V00863) gene 37 [coliphage T4] | |
| | | >gi\|215887 (J02509) tail fiber protein 37 [Bacteriophage T4] | |
| 1175 | 1001217 | (D64003) hypothetical protein | 4.4 |
| 1176 | 1175410 | HYPOTHETICAL 126.5 KD PROTEIN C31A2.16 IN | 4.4 |
| | | CHROMOSOME I >gi\|2130427\|pir\|\|S58108 hypothetical protein | |
| 1177 | 2829216 | (AF044287) delta adaptin subunit of AP-3 [Drosophila melanogaster] | 4.2 |
| 1178 | 1084374 | histone-lysine N-methyltransferase (EC 2.1.1.43) large chain N- | 4.1 |
| | | methyltransferase - garden pea carboxylase large subunit N- | |
| | | methyltransferase [Pisum sativum] | |
| 1179 | 567166 | (L03172) This CDS feature is included to show the translation of the | 3.8 |
| | | corresponding V_region. Presently translation qualifiers on V_region | |
| | | features are illegal. | |
| 1180 | 2492625 | HYPOTHETICAL 49.3 KD PROTEIN C09G5.1 IN | 3.2 |
| | | CHROMOSOME II >gi\|3874104\|emb\|CAA86760\| | |
| 1181 | 1065455 | (U40410) coded for by C. elegans cDNA yk9e10.5; coded for by C. | 2.6 |
| | | elegans cDNA yk9e10.3; multiple regions of similarity to EGF-like | |
| | | repeats and cysteine-rich repeats | |
| 1182 | 3406753 | (AF068182) B cell linker protein BLNK [Mus musculus] | 2.6 |
| 1183 | 1065455 | (U40410) coded for by C. elegans cDNA yk9e10.5; coded for by C. | 2.5 |
| | | elegans cDNA yk9e10.3; multiple regions of similarity to EGF-like | |
| | | repeats and cysteine-rich repeats | |
| 1184 | 4539761 | (AF118391) salivary peroxidase | 2.5 |
| 1185 | 101919 | mating-type locus protein b3 - smut fungus | 2.1 |
| 1186 | 329876 | (M32084) polyprotein [Hepatitis C virus] | 1.5 |
| 1187 | 3881059 | (AL023844) similar to Ion transport proteins [Caenorhabditis | 1.4 |
| 1188 | 2981221 | (AF053091) eyelid [Drosophila melanogaster] | 1.4 |
| 1189 | 4566750 | (AF115773) basic helix-loop-helix transcription factor Ndr1b [Danio | 1.4 |
| 1190 | 552072 | (M13235) abl-like putative oncogene; putative | 0.62 |
| 1191 | 1438951 | (U61842) cutinase negative acting protein [Fusarium solani f. sp. | 0.5 |
| 1192 | 3875904 | (Z70207) predicted using Genefinder; similar to collagen; cDNA | 0.025 |
| | | EST EMBL:D65905 comes from this gene; cDNA EST | |
| | | EMBL:D65858 comes from this gene; cDNA EST EMBL:D69306 | |
| | | comes from this gene; cDNA EST EMBL:D65755 comes from this | |
| 1193 | 3150503 | (AF067217) contains similarity to myosin head (motor) domains | 0.002 |
| | | (Pfam: myosin_head.hmm score: 602.72, 40.38 and 128.290) and | |
| | | phorbol esters/diacylglycerol binding domains (Pfam: DAG_PE- | |
| | | bind.hmm, score: 21.52 and 36.32) | |
| 1194 | 110849 | proline-rich protein - mouse proline-rich protein [Mus musculus] | 5e−005 |
| 1195 | 3435157 | (AF049910) TACC1 [Homo sapiens] | 7e−011 |
| 1196 | 3287336 | (AF014903) NADH dehydrogenase subunit 2 [Pan troglodytes] | 5e−011 |
| | | >gi\|3287338 (AF014904) NADH dehydrogenase subunit 2 [Pan | |
| 1197 | 4226073 | (AF125443) contains similarity to S. pombe phosphatidyl synthase | 2e−011 |
| | | (GB:Z28295) [Caenorhabditis elegans] | |
| 1198 | 868241 | (U29488) C56C10.3 gene product [Caenorhabditis elegans] | 2e−011 |
| 1199 | 3894323 | (AB020063) Keap1 [Mus musculus] | 5e−012 |
| 1200 | 466102 | PUTATIVE AMINOPEPTIDASE ZK353.6 IN CHROMOSOME III | 3e−014 |
| | | >gi\|1078908\|pir\|\|S44657 ZK353.6 protein - Caenorhabditis elegans | |
| | | >gi\|289760 (L15313) homology with leucine aminopeptidase; coded | |
| | | for by C. elegans cDNAs CE2F12 (GenBank: Z14714) and CE15D11 | |
| 1201 | 3608372 | (AF053768) brain specific cortactin-binding protein CBP90 [Rattus | 2e−016 |
| 1202 | 3293547 | (AF072709) putative oxidoreductase [Streptomyces lividans] | 2e−019 |
| 1203 | 4567068 | (AF125568) tumor suppressing STF cDNA 4 [Homo sapiens] | 3e−031 |
| 1204 | 4507851 | reserved >gi\|3928762\|dbj\|BAA34703\| | 1e−048 |
| 1205 | 3746791 | (AF081788) putative spliceosome associated protein [Homo sapiens] | 4e−051 |
| | | >gi\|3985930\|dbj\|BAA34863\|(AB020623) DAM1 [Homo sapiens] | |
| 1206 | 3851703 | (AF100421) p80 [Rattus norvegicus] | 2e−064 |
| 1207 | 4519883 | (AB017970) dipeptidyl peptidase III | 3e−071 |
| 1245 | 2370558 | (Z98763) putative Inositol polyphosphate phosphatase | 9.1 |
| | | [Schizosaccharomyces pombe] | |
| 1246 | 1076815 | NADH dehydrogenase subunit I - maize | 8.3 |
| 1247 | 409711 | (L25658) ORF [Blueberry scorch virus] | 8.3 |
| 1248 | 4323053 | (AF098293) pyruvate decarboxylase | 8.3 |
| 1249 | 2493794 | C4B-BINDING PROTEIN BETA CHAIN PRECURSOR | 8.2 |
| | | >gi\|2143627\|pir\|\|S57960 C4BP protein beta chain precursor - rat | |
| | | >gi\|899382\|emb\|CAA90392\|(Z50052) C4BP beta chain, leader | |
| 1250 | 1703342 | APOLIPOPROTEIN D PRECURSOR | 6.8 |
| 1251 | 133652 | PROBABLE RNA-DIRECTED RNA POLYMERASE polymerase | 6.6 |
| | | (EC 2.7.7.48) - southern bean mosaic virus mosaic virus] | |
| 1252 | 2128472 | hypothetical protein MJ0749 - Methanococcus jannaschii | 6.5 |
| | | >gi\|1591462 (U67520) conserved hypothetical protein | |
| 1253 | 2499265 | NADH-UBIQUINONE OXIDOREDUCTASE CHAIN 4 | 6.4 |
| | | >gi\|1182022\|emb\|CAA56534\|(X80245) ND4 [Locusta migratoria] | |
| 1254 | 1098322 | Ran/TC4-binding nucleopore protein [Homo sapiens] | 5.3 |
| 1255 | 283518 | homeotic protein smox-5 - fluke (Schistosoma mansoni) >gi\|161110 | 5.2 |
| | | (M85304) homeodomain protein | |
| 1256 | 119714 | EXTENSIN PRECURSOR (CELL WALL HYDROXYPROLINE- | 4.9 |
| | | RICH GLYCOPROTEIN) >gi\|82169\|pir\|\|S06733 hydroxyproline−rich | |
| | | glycoprotein precursor - common tobacco >gi\|19867\|emb\|CAA32090\| | |
| | | (X13885) extensin (AA 1-620) [Nicotiana tabacum] | |
| 1257 | 1176529 | HYPOTHETICAL 100.9 KD PROTEIN C34E10.3 IN | 4.8 |
| | | CHROMOSOME III >gi\|500726 (U10402) C34E10.3 gene product | |
| 1258 | 116922 | COPPER RESISTANCE PROTEIN B PRECURSOR | 3.8 |
| | | >gi\|77826\|pir\|\|B32018 copper resistance protein B precursor - | |
| 1259 | 1352916 | HYPOTHETICAL 19.0 KD PROTEIN IN NNF1-STE24 | 3.7 |
| | | INTERGENIC REGION >gi\|1077909\|pir\|\|S57138 hypothetical | |
| | | protein YJR115w - yeast (Saccharomyces cerevisiae) | |
| | | >gi\|1015833\|emb\|CAA89645\|(Z49615) ORF YJR115w | |
| 1260 | 184111 | (M20677) Kruppel-related protein (AA at 172) [Homo sapiens] | 3.7 |
| 1261 | 122137 | BOLA CLASS I HISTOCOMPATIBILITY ANTIGEN, ALPHA | 3.6 |
| | | CHAIN BL3-6 PRECURSOR antigen alpha chain precursor (BL3-6) | |
| 1262 | 1086822 | (U41263) this gene lies in the intron of T19D12.4 and on the opposite | 3 |
| | | strand; strong similarity to casein kinases and to C. elegans proteins | |
| | | CO3C10.2, F41G3.5 and ZK507.1 | |
| 1263 | 3257206 | (AP000003) 338aa long hypothetical protein | 3 |
| 1264 | 4493896 | (AL034558) predicted using hexExon; MAL3P2.18 (PFCO245c), | 2.8 |
| | | Hypothetical protein, len: 3934 aa | |
| 1265 | 732330 | GENERAL STRESS PROTEIN A Bacillus subtilis | 2.2 |
| | | >gi\|580866\|emb\|CAA51568\|(X73124) ipa-12d [Bacillus subtilis] | |
| 1266 | 4155225 | (AE001499) putative ROD SHAPE-DETERMINING PROTEIN | 2.1 |
| 1267 | 2224448 | (AB001684) ORF54c [Chlorella vulgaris] | 1.4 |
| 1268 | 3406654 | (AF079369) transcriptional repressor TUP1 [Dictyostelium | 1.4 |
| 1269 | 3335561 | (AF069736) PCAF associated factor 65 beta [Homo sapiens] | 1.3 |
| 1270 | 2326171 | (U62794) CDC42 GAP-related protein [Homo sapiens] | 1.3 |
| 1271 | 3406654 | (AF079369) transcriptional repressor TUP1 [Dictyostelium | 1.2 |
| 1272 | 2145956 | probable phosphomannomutase (EC 5.4.2.8) - Mycobacterium leprae | 1 |
| | | >gi\|467178 (U00022) u0308b; L308_F1_13 [Mycobacterium leprae] | |
| 1273 | 2649256 | (AE001012) GMP synthase (guaA-2) [Archaeoglobus fulgidus] | 1 |
| 1274 | 3451437 | (AL031350) putative secreted protein | 0.76 |
| 1275 | 1653006 | (D90910) hypothetical protein | 0.21 |
| 1276 | 1001821 | (D64005) nickel resistance [Synechocystis sp.] | 0.14 |
| 1277 | 1123087 | (U42436) C49H3.3 gene product [Caenorhabditis elegans] | 0.013 |
| 1278 | 1123087 | (U42436) C49H3.3 gene product [Caenorhabditis elegans] | 0.0004 |
| 1279 | 183894 | (M69054) insulin-like growth factor binding protein 6 | 7e−005 |
| 1280 | 3608372 | (AF053768) brain specific cortactin-binding protein CBP9O [Rattus | 9e−011 |
| 1281 | 3114818 | (AJ005891) JM2 [Homo sapiens] | 5e−011 |
| 1282 | 3608372 | (AF053768) brain specific cortactin-binding protein CBP90 [Rattus | 7e−016 |
| 1283 | 3608372 | (AF053768) brain specific cortactin-binding protein CBP9O [Rattus | 2e−016 |
| 1284 | 3649741 | (AJ000281) mucin [Homo sapiens] | 2e−031 |
| 1285 | 4240307 | (AB020716) KIAA0909 protein [Homo sapiens] | 1e−043 |
| 1286 | 4240307 | (AB020716) KIAA0909 protein [Homo sapiens] | 1e−043 |
| 1287 | 3649741 | (AJ000281) mucin [Homo sapiens] | 1e−047 |
| 1288 | 4557535 | down-regulated in adenoma protein down-regulated in adenoma | 1e−060 |
| | | (DRA) - human >gi\|291964 576-580, 579-583; acidic transcr. activ. | |
| | | domain 620-640,; homeobox motif 653-676 [Homo sapiens] | |
| 1324 | 3879589 | (Z50875) Proline rich domain; cDNA EST EMBL:D35637 comes | 9.9 |
| | | from this gene; cDNA EST yk322a3.5 comes from this gene; cDNA | |
| | | EST yk397b2.5 comes from this gene; cDNA EST yk348b11.5 | |
| | | comes from this gene; cDNA EST yk397b2.3 comes from... | |
| 1325 | 3879505 | (AL023816) T05G11.4 [Caenorhabditis elegans] | 9.4 |
| 1326 | 1346035 | FOS-RELATED ANTIGEN-1 >gi\|998348 | 8 |
| 1327 | 2648784 | (AE000981) dipeptide ABC transporter, dipeptide-binding protein | 7.9 |
| | | (dppA) [Archaeoglobus fulgidus] | |
| 1328 | 142774 | (L07023) delta-endotoxin [Bacillus thuringiensis] | 7.9 |
| 1329 | 2648784 | (AE000981) dipeptide ABC transporter, dipeptide-binding protein | 7.9 |
| | | (dppA) [Archaeoglobus fulgidus] | |
| 1330 | 3874201 | (Z81015) predicted using Genefinder | 7.7 |
| 1331 | 2358287 | (AF010404) ALR [Homo sapiens] | 7.7 |
| 1332 | 3881262 | (AL021175) Y6E2A.6 [Caenorhabditis elegans] | 6 |
| 1333 | 974143 | (L42542) RLIP76 protein [Homo sapiens] | 6 |
| 1334 | 3287188 | (Y10601) ankyrin-like protein [Homo sapiens] | 6 |
| 1335 | 730684 | UBIQUITIN-PROTEIN LIGASE RSP5 yeast (Saccharomyces | 4.6 |
| | | cerevisiae)>gi\|603364 (U18916) Rsp5p [Saccharomyces cerevisiae] | |
| 1336 | 1255865 | (U53340) coded for by C. elegans cDNA yk39e8.5; weakly similar to | 3.6 |
| | | C. elegans proteins F09G8.4 and F02E8.6 | |
| 1337 | 2687999 | (AE001123) B. burgdorferi predicted coding region BB0110 | 3.3 |
| 1338 | 623044 | (L38896) This CDS feature is included to show the translation of the | 3.1 |
| | | corresponding V_region. Presently translation qualifiers on V_region | |
| | | features are illegal | |
| 1339 | 987050 | (X65335) lacZ [Cloning vector pSV-beta-Galactosidase Control] | 2.7 |
| 1340 | 1136390 | (D79986) similar to human DNA-binding protein 5. [Homo sapiens] | 2.6 |
| 1341 | 3599395 | (AF083072) histone H1 DNA binding protein [Cenarchaeum | 1.4 |
| 1342 | 1144514 | (U34781) Antho-LWamidII preprohormone [Anthopleura | 1.2 |
| | | elegantissima] >gi\|1586846\|prf\|\|2204411A prepro-hormone | |
| 1343 | 3406654 | (AF079369) transcriptional repressor TUP1 [Dictyostelium | 0.98 |
| 1344 | 3132825 | (AF063403) putative cytosine-5 DNA methyltransferase [Zea mays] | 0.89 |
| 1345 | 1754989 | (U47661) proline-rich protein PRP2 precursor [Lupinus luteus] | 0.078 |
| 1346 | 728834 | !!!! ALU SUBFAMILY SB2 WARNING ENTRY | 0.025 |
| 1347 | 1123087 | (U42436) C49H3.3 gene product [Caenorhabditis elegans] | 0.021 |
| 1348 | 3608372 | (AF053768) brain specific cortactin-binding protein CBP90 [Rattus | 1e−009 |
| 1349 | 4507029 | sodium bicarbonate cotransporter 2 >gi\|3097316\|dbj\|BAA25898\| | 5e−016 |
| | | (AB012130) sodium bicarbonate cotransporter2 [Homo sapiens] | |
| 1350 | 2781381 | (AC004013) Similar to rabbit A-kinase-anchoring protein sapiens] | 1e−029 |
| 1351 | 4584423 | (AJ131693) AKAP450 protein [Homo sapiens] | 3e−052 |
| 1359 | 1518135 | (U66260) multidrug resistance related protein 1 | 5.2 |
| 1362 | 3450974 | (AF082496) interleukin-2 [Marmota monax] | 6.8 |
| 1363 | 1123087 | (U42436) C49H3.3 gene product [Caenorhabditis elegans] | 0.001 |
| 1364 | 119760 | COAGULATION FACTOR X PRECURSOR 3.4.21.6) precursor - | 2 |
| | | chicken >gi\|222870\|dbj\|BAA00724\| | |
| 1367 | 3861111 | (AJ235272) unknown [Rickettsia prowazekii] | 5.5 |
| 1370 | 117143 | CYTOCHROME P450 1A1 (CYPIA1) rainbow trout >gi\|213780 | 7.1 |
| | | (M21310) cytochrome P450IA1 | |
| 1371 | 3915910 | HYPOTHETICAL 36.3 KD PROTEIN IN NRDC-MOBD | 5.4 |
| | | INTERGENIC REGION >gi\|1667570 (U76612) unknown | |
| 1372 | 1708230 | HOMEOBOX PROTEIN ABDOMINAL-A | 4.1 |
| 1373 | 3024292 | RHODOPSIN >gi\|2290717 (AF000947) rhodopsin [Sepia officinalis] | 5.3 |
| 1374 | 2996206 | (AF053723) region 2 capsular polysaccharide biosynthesis protein | 2.3 |
| | | [Actinobacillus pleuropneumoniae] | |
| 1375 | 2228750 | (U93868) RNA polymerase III subunit [Homo sapiens] | 5e−011 |
| 1379 | 79960 | hypothetical 30.5 K protein - Enterococcus faecalis plasmid pAM-beta | 2e−025 |
| | | 1 >gi\|3023044 (AF007787) orfC | |
| 1380 | 465532 | HYPOTHETICAL 14.2 KD PROTEIN IN BLAB 3′REGION | 5.7 |
| | | >gi\|282541\|pir\|\|C41855 orf3 - Streptomyces cacaoi | |
| | | >gi\|217001\|dbj\|BAA00776\|(D00937) regulatory protein for beta- | |
| 1381 | 3913279 | COAT PROTEIN PRECURSOR (CAPSID PROTEIN) >gi\|535774 | 0.66 |
| | | (L09205) capsid protein [Tobacco ringspot virus] | |
| 1389 | 4493762 | (AL034368) predicted using hexExon; L779.1, Serine/threonine | 4.6 |
| | | protein kinase, len: 1359 aa; Similarity to protein kinases. A.thaliana | |
| | | NPK1-related protein kinase (TR:O22041) BLAST score: 303, sum | |
| 1390 | 131002 | PROLINE-RICH PROTEIN MP-3 >gi\|200549 | 0.1 |
| 1391 | 632098 | isp3 protein - fission yeast | 4.5 |
| 1392 | 2496862 | HYPOTHETICAL 6.1 KD PROTEIN C03B1.10 IN | 6e−006 |
| | | CHROMOSOME X >gi\|1072242 (U40952) C03B1.10 gene product | |
| 1393 | 3851703 | (AF100421) p80 [Rattus norvegicus] | 4e−056 |
| 1399 | 4493762 | (AL034368) predicted using hexExon; L779.1, Serine/threonine | 4.3 |
| | | protein kinase, len: 1359 aa; Similarity to protein kinases. A.thaliana | |
| | | NPK1-related protein kinase (TR:O22041) BLAST score: 303, sum | |
| 1400 | 129648 | PAIRED BOX PROTEIN PAX-1 | 4.3 |
| 1401 | 4115789 | (D89861) cytochrome C-type biogenesis protein CCMF | 1.9 |
| | | [Cyanidioschyzon merolae] | |
| 1402 | 135514 | T-CELL RECEPTOR BETA CHAIN PRECURSOR precursor (ANA | 0.034 |
| 1403 | 1086833 | (U41264) coded for by C. elegans cDNA CEESN26F; coded for by | 3e−009 |
| | | C. elegans cDNA CEESI89F; similar to 60S acidic ribosomal protein | |
| | | Po (L10) [Caenorhabditis elegans] | |
| 1404 | 4104168 | (AF033339) UNC-45 [Caenorhabditis briggsae] | 7e−013 |
| 1410 | 1175805 | HYPOTHETICAL PROTEIN HI1452 Haemophilus influenzae | 7.3 |
| | | (strain Rd KW20) >gi\|1574290 | |
| 1411 | 1708230 | HOMEOBOX PROTEIN ABDOMINAL-A | 4.2 |
| 1412 | 127774 | MYOSIN II HEAVY CHAIN, NON MUSCLE heavy chain | 0.56 |
| | | [Dictyostelium discoideum] | |
| 1413 | 728833 | !!!! ALU SUBFAMILY SB1 WARNING ENTRY | 0.48 |
| 1414 | 3080645 | (AC004611) Hsp27 ERE-TATA-binding protein [Homo sapiens] | 3e−008 |
| 1415 | 3687476 | (AL031786) putative atp dependent rna helicase | 1e−014 |
| | | [Schizosaccharomyces pombe] | |
| 1416 | 4557535 | down-regulated in adenoma protein down-regulated in adenoma | 5e−060 |
| | | (DRA) - human >gi\|291964 576-580, 579-583; acidic transcr. activ. | |
| | | domain 620-640,; homeobox motif 653-676 [Homo sapiens] | |
| 1421 | 2088648 | (AF002109) hypothetical protein [Arabidopsis thaliana] | 6.9 |
| 1422 | 1707768 | (Y08256) orf c01038 [Sulfolobus solfataricus] | 5.3 |
| 1423 | 3370996 | (AB008674) mBlm [Mus musculus] | 4 |
| 1424 | 3878128 | (Z69663) Weak similarity to Cotton isocitrate lyase | 1.8 |
| | | (SW:ACEA_GOSHI); cDNA EST EMBL:D33259 comes from this | |
| | | gene; cDNA EST EMBL:D35346 comes from this gene; cDNA EST | |
| | | EMBL:D36032 comes from this gene; cDNA EST EMBL:D73253 | |
| 1425 | 83996 | hypothetical protein 1 (CYb-COII intergenic region) - | 1.8 |
| | | Sauroleishmania tarentolae mitochondrion uncertain [Leishmania | |
| 1426 | 1322210 | (U26347) immunogobulin kappa, VJ region [Homo sapiens] | 1.4 |
| 1427 | 3043810 | (U88273) NADH dehydrogenase subunit 4 [Sceloporus aeneus] | 0.46 |
| 1428 | 3080645 | (AC004611) Hsp27 ERE-TATA-binding protein [Homo sapiens] | 0.0007 |
| 1429 | 4506223 | proteasome (prosome, macropain) 26S subunit, non-ATPase, 13 | 1e−066 |
| | | >gi\|36183431\|dbj\|BAA33214\| | |
| 1438 | 2944430 | (AF050157) butyrophilin-like [Mus musculus] | 8.9 |
| 1439 | 1652823 | (D90908) hypothetical protein | 3 |
| 1440 | 119714 | EXTENSIN PRECURSOR (CELL WALL HYDROXYPROLINE- | 0.9 |
| | | RICH GLYCOPROTEIN) >gi\|82169\|pir\|\|S06733 hydroxyproline-rich | |
| | | glycoprotein precursor - common tobacco >gi\|19867\|emb\|CAA32090\| | |
| | | (X13885) extensin (AA 1-620) [Nicotiana tabacum] | |
| 1441 | 509813 | (L29010) ORFB [Cryphonectria hypovirus] | 0.78 |
| 1442 | 238617 | (S64572) nonfibrillar collagen Partial, 907 aa] [Strongylocentrotus | 0.2 |
| 1443 | 3522970 | (U42390) Trio [Homo sapiens] | 0.12 |
| 1449 | 3328726 | (AE001303) ATP Synthase Subunit E [Chlamydia trachomatis] | 8.6 |
| 1450 | 501174 | (L33965) MHC class II protein [Morone saxatilis] | 8.5 |
| 1451 | 2661685 | (AL009199) hypothetical protein SC7B7.10 | 8.5 |
| 1452 | 1575684 | (U70316) IonA [Dictyostelium discoideum] | 8.4 |
| 1453 | 2128472 | hypothetical protein MJ0749 - Methanococcus jannaschii | 5 |
| | | >gi\|1591462 (U67520) conserved hypothetical protein | |
| 1454 | 1549329 | (U52845) class IV chitinase EP3-1/H5 [Daucus carota] | 4.9 |
| 1455 | 3845167 | (AE001390) hypothetical protein [Plasmodium falciparum] | 2.9 |
| 1456 | 2833306 | PUTATIVE IMPORTIN ALPHA SUBUNIT for by C. elegans | 1.7 |
| | | cDNA yk117h8.5; coded for by C. elegans cDNA yk8f10.5; coded | |
| | | for by C. elegans cDNA yk134a4.5; coded for by C. elegans cDNA | |
| | | yk53c4.5; coded for by C. elegans cDNA yk8f10.3; coded for by C. | |
| 1463 | 1731097 | HYPOTHETICAL 34.2 KD PROTEIN F07F6.2 IN | 8.3 |
| | | CHROMOSOME III >gi\|746449 (U23486) No definition line found | |
| 1464 | 4321805 | (AF063232) variant 1 major surface glycoprotein [Pneumocystis | 8.3 |
| 1465 | 4557059 | (AC007154) hypothetical protein | 4.8 |
| 1466 | 139372 | ENDOPROTEASE (LATE L3 23 KD PROTEIN) adenovirus type 7] | 4.8 |
| 1467 | 8509 | (X04813) CAD protein (AA 1 -2236) [Drosophila melanogaster] | 3.6 |
| 1468 | 422690 | myosin-binding protein H - chicken | 2e−005 |
| 1472 | 265108 | (S54379) sucrose-phosphate synthase, SPS oleracea] | 2.1 |
| 1473 | 2842704 | HYPOTHETICAL 73.3 KD PROTEIN C6G9.14 IN | 1.6 |
| | | CHROMOSOME I >gi\|1644326\|emb\|CAB03616.1\|protein | |
| 1474 | 113109 | NEURONAL ACETYLCHOLINE RECEPTOR PROTEIN, NON- | 0.7 |
| | | ALPHA-3 CHAIN PRECURSOR (GFN-ALPHA-3) non-alpha-3 | |
| | | chain precursor - goldfish >gi\|212956 auratus] | |
| 1475 | 4557535 | down-regulated in adenoma protein down-regulated in adenoma | 1e−051 |
| | | (DRA) - human >gi\|291964 576-580, 579-583; acidic transcr. activ. | |
| | | domain 620-640,; homeobox motif 653-676 [Homo sapiens] | |
| 1485 | 2315339 | (AF016438) contains similarity to C4-type zinc fingers | 9.9 |
| 1486 | 549664 | HYPOTHETICAL 23.0 KD PROTEIN IN IXR1-TFA1 | 4.4 |
| | | INTERGENIC REGION >gi\|539152\|pir\|\|S37847 hypothetical protein | |
| | | YKL030w - yeast (Saccharomyces cerevisiae) | |
| | | >gi\|486029\|emb\|CAA81864\|(Z28029) ORF YKLO3Ow | |
| 1487 | 4204234 | (AF035379) MADS-box protein 2 [Lolium temulentum] | 0.51 |
| 1488 | 126390 | LORICRIN >gi\|110649\|pir\|\|A35628 loricrin - mouse >gi\|198871 | 0.14 |
| | | (M34398) loricrin [Mus musculus] >gi\|520480 (U09189) loricrin | |
| 1489 | 4557535 | down-regulated in adenoma protein down-regulated in adenoma | 4e−050 |
| | | (DRA) - human >gi\|291964 576-580, 579-583; acidic transcr. activ. | |
| | | domain 620-64O,; homeobox motif 653-676 [Homo sapiens] | |
| 1492 | 1707768 | (Y08256) orf c01038 [Sulfolobus solfataricus] | 4.3 |
| 1493 | 4376203 | (U35226) putative cytochrome P-450 | 4.3 |
| 1494 | 3721884 | (AB016248) sterol-C5-desaturase [Mus musculus] | 4.2 |
| 1495 | 131000 | ACIDIC PROLINE-RICH PROTEIN PRECURSOR salivary protein | 3.3 |
| | | [Rattus norvegicus] | |
| 1496 | 3123638 | (AJ223069) TCF-3 protein [Mus musculus] | 0.49 |
| 1497 | 854065 | (X83413) U88 [Human herpesvirus 6] | 5e−010 |
| 1501 | 126679 | GALECTIN-3 (GALACTOSE-SPECIFIC LECTIN 3) (MAC-2 | 0.21 |
| | | ANTIGEN) (IGE-BINDING PROTEIN) (35 KD LECTIN) | |
| | | (CARBOHYDRATE BINDING PROTEIN 35) (CBP 35) | |
| | | GALACTOSIDE-BINDING LECTIN) >gi\|1072481\|pir\|\|A28651 | |
| 1502 | 4106562 | (Z83819) dJ146H21.2 (similar to CYTOCHROME B-245 HEAVY | 1e−011 |
| | | CHAIN) [Homo sapiens] | |
| 1504 | 265108 | (S54379) sucrose-phosphate synthase, SPS oleracea] | 1.6 |
| 1505 | 1177322 | (X95466) CPG2 protein [Rattus norvegicus] | 0.0002 |
| 1507 | 3878057 | (Z99942) similar to von Willebrand factor type A domain; cDNA | 0.039 |
| | | EST yk412d4.5 comes from this gene; cDNA EST yk412d4.3 comes | |
| | | from this gene [Caenorhabditis elegans] | |
| 1509 | 2394509 | (AF024503) No definition line found [Caenorhabditis elegans] | 6.1 |
| 1510 | 2827872 | (U79229) NADH dehydrogenase subunit F [Tradescantia zebrina] | 4.6 |
| 1511 | 3004653 | (AF017777) tweety [Drosophila melanogaster] | 3.7 |
| 1512 | 3873773 | (Z83316) Similarity to S.pombe hypothetical protein C2F7.02C | 1.6 |
| 1513 | 586295 | HYPOTHETICAL 33.8 KD PROTEIN IN YSW1-RIB7 | 0.081 |
| | | INTERGENIC REGION >gi\|626526\|pir\|\|S46023 hypothetical protein | |
| | | YBR152w - yeast (Saccharomyces cerevisiae) | |
| | | >gi\|536480\|emb\|CAA85111\|(Z36021) ORF YBR152w | |
| 1519 | 3882147 | (AB018256) KIAA0713 protein [Homo sapiens] | 9.9 |
| 1520 | 2117181 | (Z95584) mcr [Mycobacterium tuberculosis] | 7.3 |
| 1521 | 1169862 | G-BOX BINDING FACTOR 3 >gi\|600863 thaliana] | 6 |
| 1522 | 3257950 | (AP000006) 236aa long hypothetical protein | 6 |
| 1523 | 4138677 | (AJ009814) polymerase [Viral hemorrhagic septicemia virus] | 5.9 |
| 1524 | 2736413 | (AF039044) No definition line found [Caenorhabditis elegans] | 5.7 |
| 1525 | 2058691 | (U94836) ERPROT 213-21 [Homo sapiens] | 2.7 |
| 1526 | 347124 | (L20967) phosphodiesterase [Homo sapiens] | 2 |
| 1527 | 3913674 | FERRIC REDUCTASE TRANSMEMBRANE COMPONENT 3 | 2 |
| | | PRECURSOR >gi\|2132959\|pir\|\|S67293 probable membrane protein | |
| | | YOR381w - yeast (Saccharomyces cerevisiae) | |
| | | >gi\|1420821\|emb\|CAA99713\|(Z75289) ORF YOR381w | |
| 1528 | 1086636 | (U41013) similar to phosphoribosylaminoimidazolecarboxamide | 0.9 |
| | | formyltransferase [Caenorhabditis elegans] | |
| 1529 | 2495706 | HYPOTHETICAL PROTEIN KIAA0136 product is novel. [Homo | 0.86 |
| 1530 | 4007775 | (AL034486) hypothetical fungal binuclear cluster domain protein | 0.65 |
| | | [Schizosaccharomyces pombe] | |
| 1531 | 113671 | !!!! ALU CLASS F WARNING ENTRY !!!! | 0.39 |
| 1532 | 4098124 | (U73522) AMSH [Homo sapiens] | 8e−008 |
| 1533 | 1174546 | SYNAPTOTAGMIN II | 5e−010 |
| 1534 | 4139228 | (AF109134) 7-60 [Homo sapiens] >gi\|4139272 (AF112980) 7-60 | 5e−044 |
| 1535 | 2564328 | (AB006628) KIAA0290 [Homo sapiens] | 3e−050 |
| 1536 | 3668141 | (AJ007398) PBK1 protein [Homo sapiens] | 3e−057 |
| 1544 | 3256484 | (AP000001) 158aa long hypothetical protein [Pyrococcus horikoshii] | 9.1 |
| 1545 | 2735945 | (AF015193) NADH dehydrogenase subunit 3 [Onchocerca volvulus] | 7.5 |
| 1546 | 3983015 | (AF096056) antigen receptor [Ginglymostoma cirratum] | 3.2 |
| 1547 | 1552169 | (D42138) PIG-B [Homo sapiens] | 3 |
| 1548 | 2440180 | (Z99531) ubiquitin system protein | 2.4 |
| 1549 | 3882159 | (AB018262) KIAA0719 protein [Homo sapiens] | 1.8 |
| 1550 | 3004653 | (AF017777) tweety [Drosophila melanogaster] | 1.3 |
| 1551 | 77657 | hypothetical 30.1 K protein - Pseudomonas aeruginosa | 0.26 |
| 1552 | 4098124 | (U73522) AMSH [Homo sapiens] | 0.002 |
| 1553 | 3979818 | (Z49967) cDNA EST EMBL:T00743 comes from this gene; cDNA | 0.001 |
| | | EST EMBL:D69356 comes from this gene; cDNA EST | |
| | | EMBL:D65790 comes from this gene; cDNA EST EMBL:D70463 | |
| | | comes from this gene; cDNA EST EMBL:D66620 comes from this | |
| 1554 | 3550295 | (AJ009947) putative ATPase [Homo sapiens] | 1e−008 |
| 1555 | 4507507 | UNKNOWN >gi\|3929583 (AF098162) timeless homolog [Homo | 1e−035 |
| 1562 | 3152567 | (AC002986) Contains similarity to membrane associated salt- | 8.4 |
| | | inducible protein gb\|AF007269 from A. thaliana. | |
| 1563 | 4493978 | (AL034559) predicted using hexExon; MAL3P7.21 (PFC0960c), | 5 |
| | | Hypothetical protein, len: 1929 aa | |
| 1564 | 1169862 | G-BOX BINDING FACTOR 3 >gi\|600863 thaliana] | 4.7 |
| 1565 | 140550 | HYPOTHETICAL 259 KD PROTEIN (ORF 2136) | 3.7 |
| | | >gi\|81341\|pir\|\|A05037 hypothetical protein 2136 - liverwort | |
| | | (Marchantia polymorpha) chloroplast polymorpha] | |
| 1566 | 2224354 | (AB001684) ORF104 [Chlorella vulgaris] | 0.76 |
| 1567 | 106322 | hypothetical protein (L1H 3′ region) - human | 0.53 |
| 1568 | 3522937 | (AC004411) unknown protein [Arabidopsis thaliana] | 0.4 |
| 1569 | 4097433 | (U61084) phorbolin 3 [Homo sapiens] | 4e−017 |
| 1578 | 1944122 | (AB002531) SSU1p [Saccharomyces cerevisiae] | 9.7 |
| 1579 | 4127662 | (Y11176) fructosidase [Cichorium intybus] | 5.3 |
| 1580 | 119515 | EPENDYMIN I PRECURSOR (EPD-I) rainbow trout >gi\|213412 | 4.4 |
| | | (M93697) ependymin | |
| 1581 | 1439625 | (U64598) weakly similar to S. cervisiae PTM1 precursor | 2.6 |
| 1582 | 2183261 | (AF002133) MAV264 [Mycobacterium avium] | 2.3 |
| 1583 | 2388564 | (AC000098) ESTs gb\|AA042402, gb\|ATTS1380 come from this gene. | 1.9 |
| | | [Arabidopsis thaliana] | |
| 1584 | 1381091 | (U51723) V-SERA 1 [Plasmodium vivax] | 9.8 |
| 1587 | 2496317 | HYPOTHETICAL PROTEIN MG144 HOMOLOG Mycoplasma | 0.65 |
| | | pneumoniae (SGC3) (ATCC 29342) >gi\|1674380 genitalium | |
| 1588 | 2496317 | HYPOTHETICAL PROTEIN MG144 HOMOLOG Mycoplasma | 0.64 |
| | | pneumoniae (SGC3) (ATCC 29342) >gi\|1674380 genitalium | |
| 1589 | 3184073 | (AL023779) hypothetical protein | 8e−009 |
| 1590 | 3560165 | (AL031525) hypothetical protein | 3.7 |
| 1612 | 133594 | RNA-DIRECTED RNA POLYMERASE (ORF1B) 2.7.7.48) - avian | 9.7 |
| | | infectious bronchitis virus (strain Beaudette) >gi\|292953 (M95169) | |
| | | pol protein [Avian infectious bronchitis virus] >gi\|331173 (M94356) | |
| | | ORF 1b encodes a polypeptide of potential mol. wt. 300,000. | |
| 1613 | 3043622 | (AB011121) KIAA0549 protein [Homo sapiens] | 6.8 |
| 1614 | 72870 | translation elongation factor eEF-1 alpha chain factor 1-alpha (AA 1- | 5.6 |
| | | 461) [Mus musculus] | |
| 1615 | 2315365 | (AF016441) No definition line found [Caenorhabditis elegans] | 5.3 |
| 1616 | 586120 | TRICHOHYALIN >gi\|539701\|pir\|\|A45973 trichohyalin - human | 4.9 |
| | | >gi\|292836 (L09190) trichohyalin | |
| 1617 | 281206 | nuclear antigen EBNA-3B - human herpesvirus 4 | 3.9 |
| 1618 | 2146731 | FK506-binding protein - Arabidopsis thaliana | 3.5 |
| 1619 | 3876045 | (Z81506) similar to Lectin C-type domain short and long forms, CUB | 3.5 |
| | | domain [Caenorhabditis elegans] | |
| 1620 | 2833191 | LACCASE 4 PRECURSOR precursor - Rhizoctonia solani | 3.3 |
| | | >gi\|1150568\|emb\|CAA91042\| | |
| 1621 | 2981221 | (AF053091) eyelid [Drosophila melanogaster] | 3.2 |
| 1622 | 1118179 | (U42304) chitin synthase [Phytophthora capsici] | 2.9 |
| 1623 | 1351576 | HYPOTHETICAL PROTEIN MG419 Mycoplasma genitalium | 2.9 |
| 1624 | 320309 | AL2 protein - beet curly top virus >gi\|210683 | 2.5 |
| 1625 | 1523997 | (X99510) CDK4/6 kinase [Drosophila melanogaster] | 2.1 |
| 1626 | 3646450 | (AL031603) conserved hypothetical protein. | 2 |
| 1627 | 3599342 | (AF081112) ORF2 [Mus musculus domesticus] | 1.9 |
| 1628 | 2114473 | (U96963) p140mDia [Mus musculus] | 1.5 |
| 1629 | 3638957 | (AC004877) sco-spondin-mucin-like; similar to P98167 uncertain | 1 |
| | | [Homo sapiens] | |
| 1630 | 2558942 | (AF024714) interferon-inducible protein [Homo sapiens] | 0.93 |
| 1631 | 3257709 | (AP000005) 115aa long hypothetical protein | 0.69 |
| 1632 | 346430 | adenylylcyclase type V-alpha - dog >gi\|290082 | 0.46 |
| 1633 | 4263788 | (AC006068) hypothetical protein | 0.3 |
| 1634 | 2134199 | myosin I beta - bullfrog >gi\|602138 (U14549) myosin I beta [Rana | 0.044 |
| | | catesbeiana] >gi\|603692 (U14382) myosin I beta [Rana catesbeiana] | |
| 1635 | 2134199 | myosin I beta - bullfrog >gi\|602138 (U14549) myosin I beta [Rana | 0.036 |
| | | catesbeiana] >gi\|603692 (U14382) myosin I beta [Rana catesbeiana] | |
| 1636 | 3776027 | (AJ010475) RNA helicase [Arabidopsis thaliana] | 2e−006 |
| 1637 | 134787 | ATP-DEPENDENT RRNA HELICASE SPB4 cerevisiae] | 1e−015 |
| | | >gi\|836754\|dbj\|BAA09238\|(D50617) rRNA helicase | |
| | | [Saccharomyces cerevisiae] SPB4 [Saccharomyces cerevisiae] | |
| 1638 | 134787 | ATP-DEPENDENT RRNA HELICASE SPB4 cerevisiae] | 4e−016 |
| | | >gi\|836754\|dbj\|BAA09238\|(D50617) rRNA helicase | |
| | | [Saccharomyces cerevisiae] SPB4 [Saccharomyces cerevisiae] | |
| 1639 | 4454698 | (AF070661) HSPC005 [Homo sapiens] | 2e−016 |
| 1640 | 4185892 | (AL033125) 1-evidence=predicted by content; 1- | 6e−021 |
| | | method=genefinder; 084; 1-evidence_end; 2-evidence=predicted by | |
| | | match; 2-match_accession=SWISS-PROT:P38205; 2- | |
| | | match_description=HYPOTHETICAL 77.9 KD PROTEIN IN | |
| 1641 | 3043548 | (AB011084) KIAA0512 protein [Homo sapiens] | 9e−041 |
| 1643 | 2435574 | (AF026209) similar to C. elegans olfactory receptor ODR-10 | 7.3 |
| | | (NID:g1235900) [Caenorhabditis elegans] | |
| 1644 | 3880252 | (Z82055) similar to Zinc finger, C4 type | 5.7 |
| 1645 | 3023744 | PUTATIVE FLAGELLA-RELATED PROTEIN C | 4.5 |
| 1646 | 267478 | HYPOTHETICAL 64.3 KD PROTEIN IN RPS3 3′ REGION | 2 |
| | | (ORF516) >gi\|419731\|pir\|\|S34525 hypothetical protein 516 (rps3 3′ | |
| | | region) - Euglena gracilis chloroplast >gi\|2673852\|emb\|CAA50104\| | |
| | | (X70810) orf516; ttg start [Euglena gracilis] | |
| 1647 | 82551 | hypothetical 237 protein (psbA 5′ region) - rye chloroplast (fragment) | 0.49 |
| 1648 | 1255792 | (U51993) similar drosophila lethal (2) giant larvae protien | 0.09 |
| | | (SP:Q08470) [Caenorhabditis elegans] | |
| 1663 | 627837 | All-1 protein +GTE form - mouse (fragment) | 9.6 |
| 1664 | 4115789 | (D89861) cytochrome C-type biogenesis protein CCMF | 6.3 |
| | | [Cyanidioschyzon merolae] | |
| 1665 | 942618 | (U31081) MnxB [Bacillus sp.] | 6 |
| 1666 | 220579 | (D00570) open reading frame (196 AA) [Mus musculus] | 5.8 |
| 1667 | 2120082 | hypothetical protein II (retroposon LINE-1) | 4.9 |
| 1668 | 2120082 | hypothetical protein II (retroposon LINE-1) | 4.8 |
| 1669 | 862343 | (L10908) Gcap1 gene product [Mus musculus] marker protein [Mus | 4.6 |
| 1670 | 1168540 | ARGININOSUCCINATE SYNTHASE argininosuccinate synthetase | 4.5 |
| | | (argG) homolog - Haemophilus influenzae (strain Rd KW20) | |
| 1671 | 160385 | (M63277) malaria antigen [Plasmodium falciparum] | 4 |
| 1672 | 1177607 | (X92485) pva1 [Plasmodium vivax] | 3.8 |
| 1673 | 2497678 | ZYXIN >gi\|1430883\|emb\|CAA67510\| | 2.5 |
| 1674 | 4049518 | (AL031852) conserved hypothetical protein | 2.1 |
| 1675 | 135514 | T-CELL RECEPTOR BETA CHAIN PRECURSOR precursor (ANA | 0.55 |
| 1676 | 729942 | LIPASE 1 PRECURSOR (TRIACYLGLYCEROL LIPASE) | 0.45 |
| | | >gi\|538817\|pir\|\|A47081 triacylglycerol lipase | |
| 1677 | 4503629 | coagulation factor XII (Hageman factor) | 0.27 |
| | | >gi\|119763\|sp\|P00748\|FA12_HUMAN COAGULATION FACTOR | |
| | | XII PRECURSOR (HAGEMAN FACTOR) (HAF) 3.4.21.38) | |
| | | precursor - human >gi\|180357 (M17466) coagulation factor XII | |
| 1678 | 1708392 | CASPASE-5 PRECURSOR (ICH-3 PROTEASE) (TY PROTEASE) | 4e−006 |
| | | (ICE(REL)-III) enzyme ICErel-III - human >gi\|903936 (U28015) | |
| | | cysteine protease [Homo sapiens] | |
| 1679 | 3550295 | (AJ009947) putative ATPase [Homo sapiens] | 1e−008 |
| 1680 | 3875400 | (Z73906) cDNA EST EMBL:M88866 comes from this gene | 1e−009 |
| | | [Caenorhabditis elegans] | |
| 1681 | 3874685 | (Z78539) Similarity to S.pombe hypothetical protein C4G8.04 | 6e−010 |
| | | (SW:YAD4_SCHPO); cDNA EST EMBL:D27846 comes from this | |
| | | gene; cDNA EST EMBL:D27845 comes from this gene; cDNA EST | |
| | | yk202h7.3 comes from this gene; cDNA EST yk202h7.5 come... | |
| 1682 | 3979818 | (Z49967) cDNA EST EMBL:T00743 comes from this gene; cDNA | 2e−015 |
| | | EST EMBL:D69356 comes from this gene; cDNA EST | |
| | | EMBL:D65790 comes from this gene; cDNA EST EMBL:D70463 | |
| | | comes from this gene; cDNA EST EMBL:D66620 comes from this | |
| 1683 | 4584877 | (AF068302) choline/ethanolaminephosphotransferase [Homo | 5e−020 |
| 1685 | 3914503 | ASPARTATE CARBAMOYLTRANSFERASE 2 PRECURSOR | 9.9 |
| | | (ASPARTATE TRANSCARBAMYLASE 2) (ATCASE 2) sativum] | |
| 1686 | 1845893 | (U69426) envelope glycoprotein [Human immunodeficiency virus | 9.7 |
| 1687 | 1730629 | HYPOTHETICAL 43.0 KD PROTEIN B0361.6 IN | 5e−014 |
| | | CHROMOSOME III >gi\|458954 (U00031) similar to H. marismortui | |
| | | hypothetical 23.1 kd protein in HMAL3 5′region [Caenorhabditis | |
| 1690 | 2133580 | gag polyprotein - red flour beetle retrotransposon Woot >gi\|805076 | 1.1 |
| | | (U09586) ORF 1 | |
| 1695 | 126296 | LINE-1 REVERSE TRANSCRIPTASE HOMOLOG protein | 6 |
| | | [Nycticebus coucang] | |
| 1696 | 111816 | probable pol polyprotein-related protein 4 - rat | 5.3 |
| | | >gi\|56590\|emb\|CAA37647\|(X53581) ORF4 [Rattus norvegicus] | |
| 1697 | 1517923 | (U51117) ascospore maturation 1 protein [Neurospora crassa] | 5.3 |
| 1698 | 2924552 | (AL022018) 1-evidence=predicted by content; 1- | 6e−012 |
| | | method=genefinder; 084; 1-method_score=165.48; 1-evidence_end; 2- | |
| | | evidence=predicted by match; 2-match_accession=AA264666; 2- | |
| | | match_description=LD08351.5prime LD Drosophila melanogaste... | |
| 1699 | 1663706 | (D87685) similar to human transcription factor TFIIS (S34159). | 2e−014 |
| 1700 | 3879850 | (Z81592) predicted using Genefinder | 3e−034 |
| 1707 | 3184085 | (AL023781) cytochrome c oxidase polypeptide v precursor | 8.7 |
| | | [Schizosaccharomyces pombe] | |
| 1708 | 3845206 | (AE001400) novel protein kinase [Plasmodium falciparum] | 3.9 |
| 1709 | 283435 | hypothetical protein DGF-1 - Trypanosoma cruzi cruzi] | 3 |
| 1710 | 3329623 | (AF078790) No definition line found [Caenorhabditis elegans] | 1.3 |
| 1711 | 2459999 | (AF013108) tubulin Uni3 [Chlamydomonas reinhardtii] | 0.32 |
| 1712 | 1705447 | BACTENECIN 7 PRECURSOR (BAC7) aries] | 0.26 |
| 1713 | 3043596 | (AB011108) KIAA0536 protein [Homo sapiens] | 4e−022 |
| 1714 | 3879850 | (Z81592) predicted using Genefinder | 3e−033 |
| 1724 | 987050 | (X65335) lacZ [Cloning vector pSV-beta-Galactosidase Control] | 7.6 |
| 1725 | 1334582 | (X55026) ORF16; no ATG start codon | 6.8 |
| 1726 | 2981631 | (AB012223) ORF2 [Canis familiaris] | 5.2 |
| 1727 | 628300 | gene F protein - rinderpest virus virus] | 4.8 |
| 1728 | 4008417 | (Z77669) Similarity to Human aminopeptidase N | 3.9 |
| | | (SW:AMPN_HUMAN); cDNA EST EMBL:D36412 comes from this | |
| | | gene; cDNA EST EMBL:D37688 comes from this gene; cDNA EST | |
| | | EMBL:D34550 comes from this gene; cDNA EST EMBL:D33568 | |
| 1729 | 1170083 | PROBABLE GLOBAL TRANSACTIVATOR transactivator-like | 3.4 |
| | | protein [Autographa californica nucleopolyhedrovirus] | |
| 1730 | 3757727 | (AL022727) dJ80I19.7 (olfactory receptor-like protein (hs6M1-3)) | 3.3 |
| | | [Homo sapiens] | |
| 1731 | 126296 | LINE-1 REVERSE TRANSCRIPTASE HOMOLOG protein | 1.2 |
| | | [Nycticebus coucang] | |
| 1732 | 130702 | LARGE STRUCTURAL PHOSPHOPROTEIN | 0.97 |
| | | PHOSPHOPROTEIN) (BPP) >gi\|73955\|pir\|\|XPBEA9 large structural | |
| | | phosphoprotein pp 150 - human cytomegalovirus phosphoprotein 150 | |
| 1733 | 1706571 | EPITHELIAL CHLORIDE CHANNEL PROTEIN calcium-activated | 0.87 |
| | | chloride channel [Bos taurus] | |
| 1734 | 2981631 | (AB012223) ORF2 [Canis familiaris] | 0.56 |
| 1735 | 1280072 | (U55366) coded for by C. elegans cDNA yk85a2.5; coded for by C. | 0.44 |
| | | elegans cDNA yk85a2.3; Similar to cuticlin | |
| 1736 | 2496862 | HYPOTHETICAL 6.1 KD PROTEIN C03B1.10 IN | 0.001 |
| | | CHROMOSOME X >gi\|1072242 (U40952) C03B1.10 gene product | |
| 1737 | 2228750 | (U93868) RNA polymerase III subunit [Homo sapiens] | 1e−007 |
| 1738 | 4503511 | UNKNOWN >gi\|3264861 (U97670) eukaryotic translation initiation | 4e−031 |
| | | factor eIF3, p35 subunit [Homo sapiens] | |
| 1739 | 4503511 | UNKNOWN >gi\|3264861 (U97670) eukaryotic translation initiation | 1e−032 |
| | | factor eIF3, p35 subunit [Homo sapiens] | |
| 1740 | 113667 | !!!! ALU CLASS B WARNING ENTRY !!!! | 5.3 |
| 1742 | 2736375 | (AF039040) No definition line found [Caenorhabditis elegans] | 6 |
| 1743 | 2736375 | (AF039040) No definition line found [Caenorhabditis elegans] | 3.4 |
| 1744 | 1002672 | (U30261) G protein beta subunit-like; Method: conceptual translation | 5e−024 |
| | | supplied by author [Schistosoma mansoni] | |
| 1752 | 4200151 | (AJ011538) hypothetical protein virus] | 3.9 |
| 1753 | 134528 | SLP1 PROTEIN (VACUOLAR PROTEIN SORTING PROTEIN 33) | 1.6 |
| | | >gi\|101624\|pir\|\|A34708 SLP1 protein SLP1 protein [Saccharomyces | |
| | | cerevisiae] >gi\|173185 | |
| 1754 | 1175386 | HYPOTHETICAL 37.7 KD PROTEIN C18B11.06 IN | 0.13 |
| | | CHROMOSOME I >gi\|2130289\|pir\|\|S58305 hypothetical protein | |
| | | SPAC18B11.06 - fission yeast pombe] | |
| 1756 | 2909528 | (AL021932) PPE [Mycobacterium tuberculosis] | 4.9 |
| 1760 | 3876797 | (Z81531) cDNA EST EMBL:D66579 comes from this gene; cDNA | 3.9 |
| | | EST EMBL:D70408 comes from this gene; cDNA EST yk263d3.5 | |
| | | comes from this gene; cDNA EST yk275c1.5 comes from this gene; | |
| | | cDNA EST EMBL:C10270 comes from this gene [Caenorh... | |
| 1770 | 3608418 | (AF086634) cyclin B [Dreissena polymorpha] | 8.9 |
| 1771 | 416868 | CYTOKINE RECEPTOR COMMON BETA CHAIN PRECURSOR | 4.3 |
| | | >gi\|110595\|pir\|\|A35782 cytokine receptor common beta chain | |
| | | precursor - mouse >gi\|309101 (M34397) interleukin 3 receptor-like | |
| 1772 | 126296 | LINE-1 REVERSE TRANSCRIPTASE HOMOLOG protein | 2.9 |
| | | [Nycticebus coucang] | |
| 1773 | 728834 | !!!! ALU SUBFAMILY SB2 WARNING ENTRY | 1.9 |
| 1774 | 728836 | !!!! ALU SUBFAMILY SP WARNING ENTRY | 0.3 |
| 1775 | 126296 | LINE-1 REVERSE TRANSCRIPTASE HOMOLOG protein | 0.001 |
| | | [Nycticebus coucang] | |
| 1776 | 3879850 | (Z81592) predicted using Genefinder | 2e−037 |
| 1777 | 4155993 | (AE001560) putative [Helicobacter pylori J99] | 1.4 |
| 1782 | 225047 | reverse transcriptase related protein [Homo sapiens] | 2.2 |
| 1790 | 3785977 | (AC005560) putative growth regulator protein | 9.4 |
| 1791 | 3257681 | (AP000005) 617aa long hypothetical prolyl endopeptidase | 7.8 |
| | | [Pyrococcus horikoshii] | |
| 1792 | 2317972 | (U97553) capsid protein [murine herpesvirus 68] | 1.5 |
| 1793 | 1085738 | cytochrome-c oxidase (EC 1.9.3.1) chain I - Trypanoplasma borreli | 0.014 |
| | | mitochondrion (SGC6) >gi\|563140 borreli] | |
| 1794 | 4493973 | (AL034559) predicted using hexExon; MAL3P7.14 (PFC0925w), | 0.002 |
| | | Hypothetical protein, len: 489 aa | |
| 1800 | 461796 | CYTOCHROME C OXIDASE POLYPEPTIDE III honeybee | 9.1 |
| | | mitochondrion (SGC4) >gi\|552443 (L06178) cytochrome oxidase | |
| | | subunit 3 [Apis mellifera ligustica] | |
| 1801 | 1850592 | (U88295) carnitine palmitoyltransferase II [Rattus norvegicus] | 9 |
| 1802 | 207854 | (M35837) alpha-amylase/alpha-galactosidase fusion protein | 8.7 |
| 1803 | 2136989 | Ksp-cadherin - rabbit>gi\|902886 (U28945) Ksp-cadherin | 3.4 |
| | | [Oryctolagus cuniculus] cuniculus] | |
| 1804 | 288448 | (X06487) bcl2-Ig fusion gene [Homo sapiens] | 3.4 |
| 1805 | 1657752 | (U62325) FE65-like protein [Homo sapiens] | 2.1 |
| 1806 | 2981631 | (AB012223) ORF2 [Canis familiaris] | 5e−007 |
| 1807 | 4502103 | annexin 31 XXXI) [Homo sapiens] | 1e−043 |
| 1808 | 2149830 | (U92864) maturase [Quercus rubra] | 9.6 |
| 1809 | 2981631 | (AB012223) ORF2 [Canis familiaris] | 0.046 |
| 1810 | 728832 | !!!! ALU SUBFAMILY SB WARNING ENTRY | 0.035 |
| 1813 | 3649769 | (Z98547) predicted using hexExon; MAL3P3.17 (PFC0420w), | 2.1 |
| | | Calcium-dependent protein kinase, len: 591 aa; Similarity to calcium- | |
| | | dependent protein kinases. P.falciparum calcium-dependent protein | |
| | | kinase CDPK2 (TR:O15865) BLAST Sco... | |
| 1814 | 126296 | LINE-1 REVERSE TRANSCRIPTASE HOMOLOG protein | 1.6 |
| | | [Nycticebus coucang] | |
| 1815 | 197968 | (M26361) LINE/Ig H-chain fusion protein [Mus musculus] | 0.036 |
| 1816 | 2496862 | HYPOTHETICAL 6.1 KD PROTEIN C03B1.10 IN | 0.001 |
| | | CHROMOSOME X >gi\|1072242 (U40952) C03B1.10 gene product | |
| 1817 | 135514 | T-CELL RECEPTOR BETA CHAIN PRECURSOR precursor (ANA | 0.0006 |
| 1818 | 3043596 | (AB011108) KIAA0536 protein [Homo sapiens] | 4e−016 |
| 1821 | 728838 | !!!! ALU SUBFAMILY SX WARNING ENTRY | 7 |
| 1822 | 1177607 | (X92485) pva1 [Plasmodium vivax] | 0.23 |
| 1823 | 106323 | hypothetical protein (L1H 5′ region) - human | 0.071 |
| 1824 | 2981631 | (AB012223) ORF2 [Canis familiaris] | 2e−009 |
| 1825 | 1086860 | (U41272) Similar to man(9)-alpha-mannosidase. | 1e−032 |
| 1829 | 2258350 | (AF007261) Sec Y-type transporter protein [Reclinomonas | 2.9 |
| 1830 | 1169643 | FMRFAMIDE-RELATED NEUROPEPTIDES PRECURSOR | 0.026 |
| | | >gi\|416208 (U03137) neuropeptide precursor FMRFamide-related | |
| 1834 | 585424 | LIPOATE-PROTEIN LIGASE A 6.3.4.-) A - Escherichia coli | 7.1 |
| | | >gi\|504496 (L27665) lipoate-protein ligase A [Escherichia coli] | |
| 1835 | 2981631 | (AB012223) ORF2 [Canis familiaris] | 0.044 |
| 1841 | 4584540 | (AL049608) putative protein [Arabidopsis thaliana] | 7.3 |
| 1842 | 4493975 | (AL034559) predicted using hexExon; MAL3P7.17 (PFC0940c), | 3 |
| | | Hypothetical protein, len: 807 aa | |
| 1843 | 343539 | (M14820) NADH dehydrogenase subunit 4 [Trypanosoma brucei] | 1.7 |
| 1844 | 3335138 | (AF047441) RNA polymerase I 40 kD subunit [Homo sapiens] | 1 |
| 1852 | 2612897 | (AF015825) hypothetical ABC transporter [Bacillus subtilis] | 5.9 |
| | | >gi\|2633579\|emb\|CAB13082\|(Z99110) similar to amino acid ABC | |
| | | transporter (ATP-binding protein) | |
| 1853 | 728836 | !!!! ALU SUBFAMILY SP WARNING ENTRY | 1.2 |
| 1854 | 113668 | !!!! ALU CLASS C WARNING ENTRY !!!! | 0.17 |
| 1855 | 728836 | !!!! ALU SUBFAMILY SP WARNING ENTRY | 0.05 |
| 1856 | 106323 | hypothetical protein (L1H 5′ region) - human | 0.048 |
| 1857 | 2981631 | (AB012223) ORF2 [Canis familiaris] | 0.0002 |
| 1859 | 729785 | HEXOSE TRANSPORTER HXT8 YJL214w - yeast (Saccharomyces | 0.12 |
| | | cerevisiae) cerevisiae] >gi\|1015600\|emb\|CAA89511\|(Z49489) ORF | |
| | | YJL214w [Saccharomyces cerevisiae] | |
| 1861 | 1791243 | (U83119) ORF2 consensus sequence encoding endonuclease and | 4e−006 |
| | | reverse transcriptase minus RNaseH [Rattus norvegicus] | |
| 1862 | 854065 | (X83413) U88 [Human herpesvirus 6] | 2e−006 |
| 1863 | 1707274 | (U80931) strong similarity to class-III of pyridoxal-phoshate- | 3e−032 |
| | | dependent aminotransferases | |
| 1871 | 4049828 | (AF063866) ORF MSV145 hypothetical protein [Melanoplus | 5.6 |
| | | sanguinipes entomopoxvirus] | |
| 1872 | 1109853 | (U41538) weak similarity to the S. cerevisiae activator 1 05 KD | 4.5 |
| | | subunit (replication factor C 95 KD subunit) | |
| 1873 | 113668 | !!!! ALU CLASS C WARNING ENTRY !!!! | 3.6 |
| 1874 | 1684995 | (U20663) NADH dehydrogenase subunit [Encyclia tampensis] | 1.6 |
| 1875 | 3599325 | (AF081106) ORF1 [Mus musculus domesticus] | 0.36 |
| 1876 | 160379 | (M63274) malaria antigen [Plasmodium falciparum] | 0.16 |
| 1877 | 728837 | !!!! ALU SUBFAMILY SQ WARNING ENTRY | 0.12 |
| 1878 | 2134199 | myosin I beta - bullfrog >gi\|602138 (U14549) myosin I beta [Rana | 0.036 |
| | | catesbeiana] >gi\|603692 (U14382) myosin I beta [Rana catesbeiana] | |
| 1879 | 1872200 | (U22376) alternatively spliced product using exon 13A | 0.009 |
| 1880 | 1938524 | (U97012) contains similarity to a ground domain, also weakly similar | 0.17 |
| | | to drosophila fork head domain transcription factor SLP1 | |
| | | (SP:P32030) [Caenorhabditis elegans] | |
| 1882 | 3510507 | (AF032382) metalloprotease-disintegrin [Xenopus laevis] | 0.77 |
| 1883 | 728837 | !!!! ALU SUBFAMILY SQ WARNING ENTRY | 0.33 |
| 1884 | 854065 | (X83413) U88 [Human herpesvirus 6] | 1e−007 |
| 1886 | 728833 | !!!! ALU SUBFAMILY SB1 WARNING ENTRY | 7.4 |
| 1887 | 1353178 | PUTATIVE SERINE/THREONINE PROTEIN PHOSPHATASE | 7.2 |
| | | C27B7.6 IN CHROMOSOME IV serine/threonine protein | |
| | | phosphatase [Caenorhabditis elegans] | |
| 1888 | 728837 | !!!! ALU SUBFAMILY SQ WARNING ENTRY | 7e−009 |
| 1890 | 435942 | (U04295) DNA-binding factor of bZIP class [Oryza sativa] | 1 |
| 1891 | 728832 | !!!! ALU SUBFAMILY SB WARNING ENTRY | 0.94 |
| 1892 | 3599347 | (AF081114) ORF2 [Mus musculus domesticus] | 0.55 |
| 1893 | 728837 | !!!! ALU SUBFAMILY SQ WARNING ENTRY | 0.056 |
| 1894 | 1196432 | (M22333) unknown protein [Homo sapiens] | 0.002 |
| 1895 | 728838 | !!!! ALU SUBFAMILY SX WARNING ENTRY | 0.004 |
| 1901 | 728831 | !!!! ALU SUBFAMILY J WARNING ENTRY | 8 |
| 1902 | 3646450 | (AL031603) conserved hypothetical protein. | 7e−028 |
| 1903 | 2213560 | (Z97052) hypothetical protein | 5e−026 |
| 1905 | 3002527 | (AF010144) neuronal thread protein AD7c-NTP [Homo sapiens] | 0.066 |
| 1906 | 2072977 | (U93574) putative p150 [Homo sapiens] | 0.022 |
| 1907 | 728835 | !!!ALU SUBFAMILY SC WARNING ENTRY | 0.019 |
| 1908 | 4153886 | (AB013357) 49 kDa zinc finger protein [Mus musculus] | 2e−005 |
| 1910 | 2072974 | (U93573) p40 [Homo sapiens] | 2 |
| 1911 | 728837 | !!!! ALU SUBFAMILY SQ WARNING ENTRY | 0.011 |
| 1914 | 4572297 | (AF071799) T-cell surface glycoprotein CD4 precursor | 6 |
| 1915 | 1350904 | RIBOSOME RECYCLING FACTOR (RIBOSOME RELEASING | 3.7 |
| | | FACTOR) (RRF) >gi\|1361841\|pir\|\|A64248 ribosome releasing factor | |
| | | Mycoplasma genitalium (SGC3) releasing factor (frr) [Mycoplasma | |
| 1916 | 728831 | !!!! ALU SUBFAMILY J WARNING ENTRY | 1.4 |
| 1917 | 728832 | !!!! ALU SUBFAMILY SB WARNING ENTRY | 0.0006 |
| 1918 | 126296 | LINE-1 REVERSE TRANSCRIPTASE HOMOLOG protein | 4e−005 |
| | | [Nycticebus coucang] | |
| 1919 | 1791243 | (U83119) ORF2 consensus sequence encoding endonuclease and | 4e−009 |
| | | reverse transcriptase minus RNaseH [Rattus norvegicus] | |
| 1920 | 126295 | LINE-1 REVERSE TRANSCRIPTASE HOMOLOG | 0.006 |
| 1921 | 348317 | ATPase 6 - Sauroleishmania tarentolae | 7.7 |
| 1923 | 1723547 | HYPOTHETICAL 61.8 KD PROTEIN C12B10.03 IN | 8.6 |
| | | CHROMOSOME I>gi\|1262416\|emb\|CAA94693\| | |
| 1924 | 1177607 | (X92485) pva1 [Plasmodium vivax] | 4.9 |
| 1925 | 3068583 | (AF000580) Rep-like [Dictyostelium discoideum] | 2.4 |
| 1926 | 2120082 | hypothetical protein II (retroposon LINE-1) | 0.21 |
| 1927 | 1335198 | (X03145) pot. ORF III [Homo sapiens] | 0.0003 |
| 1930 | 2134328 | ECH - chicken >gi\|1037160\|dbj \|BAA08364\| | 8.3 |
| 1931 | 4502377 | B-cell growth factor 1 (12 kD) | 0.094 |
| 1932 | 3417289 | (U95740) Unknown gene product [Homo sapiens] | 0.065 |
| 1933 | 565080 | (U14550) SThM [Homo sapiens] | 0.006 |
| 1934 | 728831 | !!!! ALU SUBFAMILY J WARNING ENTRY | 7e−006 |
| 1935 | 3649741 | (AJ000281) mucin [Homo sapiens] | 5e−020 |
| 1936 | 3551821 | (AF058803) mucin 4 [Homo sapiens] | 8e−021 |
| 1937 | 4519443 | (AB017430) kinesin-like DNA binding protein [Homo sapiens] | 3e−029 |
| 1939 | 1710216 | (U79260) unknown [Homo sapiens] | 1e−005 |
| 1940 | 728837 | !!!! ALU SUBFAMILY SQ WARNING ENTRY | 5e−008 |
| 1942 | 4494012 | (AL034559) predicted using hexExon; MAL3P7.32 (PFC1010w), | 4.5 |
| | | Hypothetical protein, len: 1322 aa | |
| 1943 | 220578 | (D00570) open reading frame (251 AA) [Mus musculus] | 0.077 |
| 1944 | 2731377 | (U28739) similar to alcohol dehydrogenase/ribitol dehydrogenase | 1e−028 |
| | | [Caenorhabditis elegans] | |
| 1945 | 4587207 | (AB020527) Na/PO4 cotransporter homolog | 4e−034 |
| 1948 | 728832 | !!!! ALU SUBFAMILY SB WARNING ENTRY | 0.21 |
| 1949 | 929913 | (V01442) ribosomal protein S8 [Xenopus laevis] | 0.066 |
| 1950 | 728831 | !!!! ALU SUBFAMILY J WARNING ENTRY | 2e−006 |
| 1951 | 1125754 | (U42833) coded for by C. elegans cDNA cm16f6; coded for by C. | 1e−028 |
| | | elegans cDNA CEESU63F; similar to S. cerevisiae SOF1 protein | |
| | | (SP:P33750) [Caenorhabditis elegans] | |
| 1952 | 4587207 | (AB020527) Na/PO4 cotransporter homolog | 6e−047 |
| 1953 | 4587207 | (AB020527) Na/PO4 cotransporter homolog | 2e−051 |
| 1955 | 2981631 | (AB012223) ORF2 [Canis familiaris] | 0.027 |
| 1956 | 4138064 | (Y18301) reverse transcriptase [Ovine pulmonary adenocarcinoma | 0.0002 |
| 1961 | 4507991 | zinc finger protein 140 (clone pHZ-39) | 8.6 |
| | | >gi\|1731416\|sp\|P52738\|Z140_HUMAN ZINC FINGER PROTEIN | |
| | | 140 >gi\|2136409\|pir\|\|C57785 zinc finger protein ZNF140 - human | |
| | | >gi\|487787 (U09368) zinc finger protein ZNF140 [Homo sapiens] | |
| 1962 | 1711541 | SERINE/THREONINE PROTEIN KINASE SSK2 (SUPPRESSOR | 5.9 |
| | | OF SENSOR KINASE 2) SSK2 gene product [Saccharomyces | |
| 1963 | 3236252 | (AC004684) CER1-like protein [Arabidopsis thaliana] | 3 |
| 1964 | 728836 | !!!! ALU SUBFAMILY SP WARNING ENTRY | 0.001 |
| 1965 | 4138070 | (Y18303) reverse trascriptase [Ovine pulmonary adenocarcinoma | 0.0002 |
| 1966 | 114128 | ADP-RIBOSYLATION FACTOR 6 1-175) [Gallus gallus] | 9e−011 |
| 1967 | 2293566 | (AF012896) ADP-ribosylation factor 1 [Oryza sativa] | 2e−012 |
| 1969 | 728831 | !!!! ALU SUBFAMILY J WARNING ENTRY | 0.091 |
| 1970 | 59977 | (Z14310) tripartite fusion transcript PLA2L | 2e−005 |
| 1971 | 126296 | LINE-1 REVERSE TRANSCRIPTASE HOMOLOG protein | 9 |
| | | [Nycticebus coucang] | |
| 1972 | 4155181 | (AE001495) putative TYPE II RESTRICTION ENZYME | 4.8 |
| 1973 | 2239204 | (Z97209) vacuolar carboxypeptidase | 0.008 |
| 1974 | 3342107 | (AF075269) nef protein [Simian immunodeficiency virus] | 6.9 |
| 1978 | 423149 | X-linked retinopathy protein (C-terminal, clone XEH.8c) - human | 0.66 |
| | | (fragment) >gi\|299471\|bbs\|129340 XEH.8c} [human, Peptide Partial, | |
| 1979 | 1791243 | (U83119) ORF2 consensus sequence encoding endonuclease and | 0.025 |
| | | reverse transcriptase minus RNaseH [Rattus norvegicus] | |
| 1980 | 126296 | LINE-1 REVERSE TRANSCRIPTASE HOMOLOG protein | 0.011 |
| | | [Nycticebus coucang] | |
| 1981 | 728831 | !!!! ALU SUBFAMILY J WARNING ENTRY | 0.0009 |
| 1982 | 1791243 | (U83119) ORF2 consensus sequence encoding endonuclease and | 4e−006 |
| | | reverse transcriptase minus RNaseH [Rattus norvegicus] | |
| 1984 | 1903379 | (U52073) differentially repressed by testosterone and | 3.2 |
| | | dihydrotestosterone [Mus musculus] | |
| 1985 | 1903379 | (U52073) differentially repressed by testosterone and | 3.1 |
| | | dihydrotestosterone [Mus musculus] | |
| 1986 | 3599339 | (AF081111) ORF2 [Mus musculus domesticus] | 2e−007 |
| 1990 | 728835 | !!!! ALU SUBFAMILY SC WARNING ENTRY | 5.9 |
| 1991 | 729093 | CCAAT DISPLACEMENT PROTEIN (HOMEOBOX PROTEIN | 0.018 |
| | | CLOX) (CLOX-1) >gi\|423173\|pir\|\|S33121 homeotic protein Clox - | |
| | | dog (fragment) >gi\|2202\|emb\|CAA48782\| | |
| 1992 | 126295 | LINE-1 REVERSE TRANSCRIPTASE HOMOLOG | 0.004 |
| 1993 | 1125754 | (U42833) coded for by C. elegans cDNA cm16f6; coded for by C. | 1e−030 |
| | | elegans cDNA CEESU63F; similar to S. cerevisiae SOF1 protein | |
| | | (SP:P33750) [Caenorhabditis elegans] | |
| 1994 | 3789771 | (AF055386) MHC class I related protein precursor | 1.9 |
| 1995 | 728832 | !!!! ALU SUBFAMILY SB WARNING ENTRY | 3.1 |
| 1996 | 3023729 | FRUCTOSE-1,6-BISPHOSPHATASE fructose-1,6-bisphosphatase | 0.21 |
| | | [Mus musculus] | |
| 1997 | 3182916 | ADP-RIBOSYLATION FACTOR factor [Plasmodium falciparum] | 2e−015 |
| | | >gi\|1932731 (U57370) ADP-ribosylation factor [Plasmodium | |
| 2000 | 113668 | !!!! ALU CLASS C WARNING ENTRY !!!! | 1 |
| 2001 | 728836 | !!!! ALU SUBFAMILY SP WARNING ENTRY | 0.0003 |
| 2002 | 59977 | (Z14310) tripartite fusion transcript PLA2L | 7e−007 |
| 2003 | 91035 | laminin receptor homolog - mouse 295) [Mus musculus] | 0.12 |
| | | >gi\|228997\|prf\|\|1815216A laminin receptor [Cricetinae gen. sp.] | |
| 2005 | 4506545 | regulator of mitotic spindle assembly 1 | 3.7 |
| | | >gi\|1350799\|sp\|P49646\|RMS1_HUMAN REGULATOR OF | |
| 2006 | 1619936 | (U70935) reverse transcriptase [Peromyscus maniculatus] | 0.015 |
| 2007 | 728837 | !!!! ALU SUBFAMILY SQ WARNING ENTRY | 0.007 |
| 2008 | 728831 | !!!! ALU SUBFAMILY J WARNING ENTRY | 0.0002 |
| 2009 | 728831 | !!!! ALU SUBFAMILY J WARNING ENTRY | 5e−006 |
| 2010 | 3157938 | (AC002131) Similar to seryl-tRNA synthetase gb\|U10400 from S | 5e−029 |
| | | cerevisiae. EST gb\|N96627 comes from this gene. | |
| 2011 | 2496862 | HYPOTHETICAL 6.1 KD PROTEIN C03B1.10 IN | 0.17 |
| | | CHROMOSOME X >gi\|1072242 (U40952) C03B1.10 gene product | |
| 2012 | 2443342 | (D88764) alpha 2 type I collagen [Rana catesbeiana] | 1.2 |
| 2013 | 1546035 | (U64570) myelin/oligodendrocyte glycoprotein-16.3 kD(a) precursor | 0.15 |
| | | [Homo sapiens] >gi\|1546037 (U64571) myelin/oligodendrocyte | |
| | | glycoprotein-16.3 kD(b) precursor | |
| 2014 | 728831 | !!!! ALU SUBFAMlLY J WARNING ENTRY | 0.006 |
| 2015 | 113668 | !!!! ALU CLASS C WARNING ENTRY !!!! | 0.003 |
| 2016 | 728838 | !!!! ALU SUBFAMILY SX WARNING ENTRY | 0.0003 |
| 2017 | 728837 | !!!! ALU SUBFAMILY SQ WARNING ENTRY | 1e−005 |
| 2019 | 3002527 | (AF010144) neuronal thread protein AD7c-NTP [Homo sapiens] | 1e−005 |
| 2021 | 728838 | !!!! ALU SUBFAMILY SX WARNING ENTRY | 3e−005 |
| 2022 | 2879805 | (AL021813) hypothetical protein | 0.6 |
| 2023 | 1711659 | TCP1-CHAPERONIN COFACTOR A taurus] | 0.003 |
| 2024 | 113667 | !!!! ALU CLASS B WARNING ENTRY !!!! | 0.0007 |
| 2025 | 113667 | !!!! ALU CLASS B WARNING ENTRY !!!! | 0.0007 |
| 2026 | 87765 | hypothetical L1 protein (third intron of gene TS) - human | 0.0003 |
| | | >gi\|364964\|prf\|\|1510254A L1 repetitive element ORF [Homo | |
| 2027 | 4009460 | (AF039401) calcium-dependent chloride channel-1 [Homo sapiens] | 2e−011 |
| 2028 | 1730840 | PUTATIVE CYSTEINYL-TRNA SYNTHETASE C29E6.06C | 2e−035 |
| | | (CYSTEINE-TRNA LIGASE) (CYSRS) YNL247w - yeast | |
| 2030 | 4200165 | (Y16262) neutral invertase [Daucus carota] | 5.7 |
| 2031 | 1150834 | (U42471) Wiscott-Aldrich Syndrome protein homolog [Mus | 0.032 |
| 2032 | 113669 | !!!! ALU CLASS D WARNING ENTRY !!!! | 0.002 |
| 2033 | 728831 | !!!! ALU SUBFAMILY J WARNING ENTRY | 0.0008 |
| 2034 | 1657758 | (U66707) densin-180 [Rattus norvegicus] | 1e−024 |
| 2035 | 4165313 | (AB022083) SOX30 protein [Homo sapiens] | 0.42 |
| 2036 | 1657758 | (U66707) densin-180 [Rattus norvegicus] | 1e−024 |
| 2037 | 3193336 | (AF069301) DBI-related protein [Homo sapiens] | 7e−055 |
| 2038 | 126296 | LINE-1 REVERSE TRANSCRIPTASE HOMOLOG protein | 8e−008 |
| | | [Nycticebus coucang] | |
| 2039 | 2981631 | (AB012223) ORF2 [Canis familiaris] | 6e−008 |
| 2040 | 4098124 | (U73522) AMSH [Homo sapiens] | 3e−018 |
| 2042 | 113668 | !!!! ALU CLASS C WARNING ENTRY !!!! | 9e−006 |
| 2043 | 728837 | !!!! ALU SUBFAMILY SQ WARNING ENTRY | 5e−009 |
| 2044 | 3123312 | ZINC FINGER PROTEIN 142 (KIAA0236) Human zinc finger | 0.7 |
| | | protein (ZNF142) [Homo sapiens] | |
| 2045 | 728831 | !!!! ALU SUBFAMILY J WARNING ENTRY | 0.13 |
| 2046 | 1710216 | (U79260) unknown [Homo sapiens] | 0.005 |
| 2047 | 558401 | (Z38113) incomplete orf, len: 160, CAI: 0.09 similar to MRP_ECOLI | 1e−035 |
| | | P21590 39.9 KD PROTEIN | |
| 2048 | 224398 | ORF [Simian virus 40] | 1.6 |
| 2049 | 728838 | !!!! ALU SUBFAMILY SX WARNING ENTRY | 0.001 |
| 2050 | 728831 | !!!! ALU SUBFAMILY J WARNING ENTRY | 3e−005 |
| 2051 | 728831 | !!!! ALU SUBFAMILY J WARNING ENTRY | 3e−005 |
| 2052 | 2981631 | (AB012223) ORF2 [Canis familiaris] | 6e−007 |
| 2053 | 2981631 | (AB012223) ORF2 [Canis familiaris] | 3e−007 |
| 2054 | 2052393 | (U86758) netrin-2 like protein [Homo sapiens] sapiens] | 5e−012 |
| 2055 | 3023928 | PROBABLE HISTONE DEACETYLASE 1-2 | 6e−031 |
| 2056 | 2500285 | 60S RIBOSOMAL PROTEIN L5 | 0.015 |
| 2057 | 728836 | !!!! ALU SUBFAMILY SP WARNING ENTRY | 0.0003 |
| 2058 | 113668 | !!!! ALU CLASS C WARNING ENTRY !!!! | 0.001 |
| 2059 | 1546035 | (U64570) myelin/oligodendrocyte glycoprotein-16.3 kD(a) precursor | 0.0006 |
| | | [Homo sapiens] >gi\|1546037 (U64571) myelin/oligodendrocyte | |
| | | glycoprotein-16.3 kD(b) precursor | |
| 2060 | 543944 | CBID PROTEIN >gi\|154423 (L12006) putative [Salmonella | 5.9 |
| 2064 | 728836 | !!!! ALU SUBFAMILY SP WARNING ENTRY | 0.002 |
| 2065 | 728831 | !!!! ALU SUBFAMILY J WARNING ENTRY | 6e−006 |
| 2068 | 728831 | !!!! ALU SUBFAMILY J WARNING ENTRY | 0.013 |
| 2069 | 2072977 | (U93574) putative p150 [Homo sapiens] | 0.001 |
| 2070 | 2072972 | (U93572) putative p150 [Homo sapiens] | 8e−005 |
| 2071 | 130402 | RETROVIRUS-RELATED POL POLYPROTEIN | 4e−013 |
| 2072 | 728831 | !!!! ALU SUBFAMILY J WARNING ENTRY | 0.002 |
| 2073 | 728831 | !!!! ALU SUBFAMILY J WARNING ENTRY | 0.007 |
| 2074 | 728831 | !!!! ALU SUBFAMILY J WARNING ENTRY | 4e−006 |
| 2075 | 987050 | (X65335) lacZ [Cloning vector pSV-beta-Galactosidase Control] | 0.017 |
| 2076 | 106322 | hypothetical protein (L1H 3′ region) - human | 7e−006 |
| 2078 | 804808 | (M13100) unknown protein [Rattus norvegicus] | 0.11 |
| 2079 | 347964 | (L22453) TARBP-b gene product [Homo sapiens] | 0.001 |
| 2080 | 1196432 | (M22333) unknown protein [Homo sapiens] | 4e−005 |
| 2081 | 728831 | !!!! ALU SUBFAMILY J WARNING ENTRY | 8e−006 |
| 2082 | 3023928 | PROBABLE HISTONE DEACETYLASE 1-2 | 5e−037 |
| 2083 | 4505895 | pleiotropic regulator 1 (PRL1, Arabidopsis homolog) >gi\|2832296 | 6e−071 |
| | | (AF044333) pleiotropic regulator 1 [Homo sapiens] | |
| 2086 | 728836 | !!!! ALU SUBFAMILY SP WARNING ENTRY | 2e−005 |
| 2087 | 126296 | LINE-1 REVERSE TRANSCRIPTASE HOMOLOG protein | 6e−008 |
| | | [Nycticebus coucang] | |
| 2088 | 126296 | LINE-1 REVERSE TRANSCRIPTASE HOMOLOG protein | 7e−006 |
| | | [Nycticebus coucang] | |
| 2089 | 106322 | hypothetical protein (L1H 3′ region) - human | 2e−006 |
| 2090 | 2981631 | (AB012223) ORF2 [Canis familiaris] | 1e−014 |
| 2091 | 3336903 | (Y10809) bZIP DNA-binding protein | 2.1 |
| 2092 | 728831 | !!!! ALU SUBFAMILY J WARNING ENTRY | 0.01 |
| 2093 | 126296 | LINE-1 REVERSE TRANSCRIPTASE HOMOLOG protein | 0.002 |
| | | [Nycticebus coucang] | |
| 2094 | 728837 | !!!! ALU SUBFAMILY SQ WARNING ENTRY | 4e−008 |
| 2095 | 113671 | !!!! ALU CLASS F WARNING ENTRY !!!! | 0.0001 |
| 2096 | 386786 | (J04988) 90 kD heat shock protein [Homo sapiens] | 3e−009 |
| 2097 | 106322 | hypothetical protein (L1H 3′ region) - human | 7e−005 |
| 2099 | 126296 | LINE-1 REVERSE TRANSCRIPTASE HOMOLOG protein | 0.1 |
| | | [Nycticebus coucang] | |
| 2100 | 728831 | !!!! ALU SUBFAMILY J WARNING ENTRY | 1e−005 |
| 2101 | 2981631 | (AB012223) ORF2 [Canis familiaris] | 1e−006 |
| 2102 | 2500367 | 60S RIBOSOMAL PROTEIN L21 musculus] | 4e−007 |
| 2103 | 4106562 | (Z83819) dJ146H21.2 (similar to CYTOCHROME B-245 HEAVY | 2e−061 |
| | | CHAIN) [Homo sapiens] | |
| 2104 | 728831 | !!!! ALU SUBFAMILY J WARNING ENTRY | 8e−006 |
| 2106 | 1869835 | (Z86099) protein kinase [human herpesvirus 2] | 8.9 |
| 2107 | 1754989 | (U47661) proline-rich protein PRP2 precursor [Lupinus luteus] | 6.7 |
| 2108 | 2580578 | (AF000996) ubiquitous TPR motif, Y isoform [Homo sapiens] | 0.0004 |
| 2109 | 1173220 | 40S RIBOSOMAL PROTEIN S15A | 0.0003 |
| 2110 | 3646139 | (AJ011081) mader-drop8 [Homo sapiens] | 2e−006 |
| 2111 | 3192897 | (AF066071) SP85; PsB [Dictyostelium discoideum] | 1e−008 |
| 2112 | 126295 | LINE-1 REVERSE TRANSCRIPTASE HOMOLOG | 8e−009 |
| 2113 | 3599336 | (AF081110) ORF2 [Mus musculus domesticus] | 5e−012 |
| 2115 | 4185943 | (Y17833) pol protein [Human endogenous retrovirus K] | 2e−022 |
| 2118 | 53912 | (X57960) ribosomal protein L7 [Mus musculus] | 3e−027 |
| 2120 | 2506605 | HYPOTHETICAL 65.0 KD PROTEIN IN HUPB-COF | 4.5 |
| | | INTERGENIC REGION >gi\|1580716\|dbj\|BAA11649\|hypothetical | |
| 2121 | 2642222 | (AF030885) telomere-associated recQ-like helicase | 0.001 |
| 2125 | 1085573 | microtubule-associated protein MAP2 - rat molecular weight | 1.9 |
| | | microtubule-associated protein cell line, Peptide Partial, 381 aa] | |
| 2126 | 3192899 | (AF066072) SP85; PsB [Dictyostelium discoideum] | 0.024 |
| 2127 | 106322 | hypothetical protein (L1H 3′ region) - human | 1e−005 |
| 2128 | 2981631 | (AB012223) ORF2 [Canis familiaris] | 2e−010 |
| 2129 | 403460 | (L24521) transformation-related protein [Homo sapiens] | 0.003 |
| 2130 | 1082633 | Nascent polypeptide associated complex alpha chain - human | 3e−006 |
| | | >gi\|556642\|emb\|CAA56869\|(X80909) Nascent polypeptide | |
| | | associated complex alpha subunit [Homo sapiens] >gi\|4092060 | |
| | | (AF054187) alpha NAC [Homo sapiens] | |
| 2132 | 1669472 | (U53757) pol polyprotein [Feline immunodeficiency virus] | 6.2 |
| 2133 | 1127036 | (D26178) serine/threonine protein kinase | 0.81 |
| 2134 | 728835 | !!!! ALU SUBFAMILY SC WARNING ENTRY | 2e−007 |
| 2136 | 728837 | !!!! ALU SUBFAMILY SQ WARNING ENTRY | 5e−008 |
| 2137 | 730246 | OX-2 MEMBRANE GLYCOPROTEIN PRECURSOR precursor - | |
| | | human (fragment) >gi\|1335216\|emb\|CAA28943\| | 3e−008 |
| 2138 | 3341992 | (AF054174) histone macroH2A1.2 [Homo sapiens] | 6e−033 |
| 2139 | 1363325 | RNA helicase HEL117 - rat >gi\|897915 | 9.9 |
| 2140 | 3892705 | (AL033545) putative protein [Arabidopsis thaliana] | 0.14 |
| 2141 | 2565196 | (AF000381) non-functional folate binding protein [Homo sapiens] | 0.007 |
| 2142 | 106322 | hypothetical protein (L1H 3′ region) - human | 5e−007 |
| 2143 | 106322 | hypothetical protein (L1H 3′ region) - human | 0.033 |
| 2144 | 133902 | 40S RIBOSOMAL PROTEIN S27 ribosomal protein S27 isoform | 0.0004 |
| | | [Homo sapiens] | |
| 2145 | 111814 | hypothetical protein 3 - rat norvegicus] | 2e−011 |
| 2146 | 1669454 | (U53748) pol polyprotein [Feline immunodeficiency virus] | 8.6 |
| 2147 | 126296 | LINE-1 REVERSE TRANSCRIPTASE HOMOLOG protein | 6e−005 |
| | | [Nycticebus coucang] | |
| 2148 | 4506701 | ribosomal protein S23 S23 >gi\|543449\|pir\|\|S41955 ribosomal protein | 3e−009 |
| | | S23 - rat protein [Homo sapiens] >gi\|453281\|emb\|CAA54584\| | |
| | | (X77398) ribosomal protein S23 [Rattus norvegicus] | |
| 2149 | 126296 | LINE-1 REVERSE TRANSCRIPTASE HOMOLOG protein | 3e−011 |
| | | [Nycticebus coucang] | |
| 2152 | 1353390 | (U34998) Rad9 [Coprinus cinereus] | 8 |
| 2153 | 2134082 | hepatocyte growth factor receptor - African clawed frog | 4.8 |
| 2154 | 1196432 | (M22333) unknown protein [Homo sapiens] | 3e−006 |
| 2155 | 730451 | 60S RIBOSOMAL PROTEIN L13A (23 KD HIGHLY BASIC | 2e−008 |
| | | PROTEIN) >gi\|345897\|pir\|\|S29539 basic protein, 23K - human | |
| | | >gi\|23691\|emb\|CAA40254\|(X56932) 23 kD highly basic protein | |
| 2156 | 2072964 | (U93569) putative p150 [Homo sapiens] | 3e−009 |
| 2157 | 1791243 | (U83119) ORF2 consensus sequence encoding endonuclease and | 4e−012 |
| | | reverse transcriptase minus RNaseH [Rattus norvegicus] | |
| 2158 | 4506437 | retinoblastoma-binding protein 1; RBP 1 | 5e−008 |
| | | >gi\|1710030\|sp\|P29374\|RBB1_HUMAN RETINOBLASTOMA | |
| | | BINDING PROTEIN 1 (RBBP-1) >gi\|2136103\|pir\|\|I58383 | |
| | | retinoblastoma binding protein 1 - human protein 1, RBP1 [human, | |
| 2160 | 2981631 | (AB012223) ORF2 [Canis familiaris] | 0.0008 |
| 2161 | 126296 | LINE-1 REVERSE TRANSCRIPTASE HOMOLOG protein | 0.0005 |
| | | [Nycticebus coucang] | |
| 2162 | 728831 | !!!! ALU SUBFAMILY J WARNING ENTRY | 2e−007 |
| 2163 | 114977 | MEMBRANE-ASSOCIATED PROTEIN HEM-2 H19 protein - | 2e−012 |
| | | mouse (fragment) >gi\|51136\|emb\|CAA43693\| | |
| 2165 | 126296 | LINE-1 REVERSE TRANSCRIPTASE HOMOLOG protein | 6e−005 |
| | | [Nycticebus coucang] | |
| 2166 | 126296 | LINE-1 REVERSE TRANSCRIPTASE HOMOLOG protein | 1e−012 |
| | | [Nycticebus coucang] | |
| 2172 | 106323 | hypothetical protein (L1H 5′ region) - human | 9e−010 |
| 2173 | 126296 | LINE-1 REVERSE TRANSCRIPTASE HOMOLOG protein | 2e−013 |
| | | [Nycticebus coucang] | |
| 2174 | 126296 | LINE-1 REVERSE TRANSCRIPTASE HOMOLOG protein | 2e−013 |
| | | [Nycticebus coucang] | |
| 2175 | 695802 | (L39061) transcription factor SL1 [Homo sapiens] | 4e−014 |
| 2177 | 2072964 | (U93569) putative p150 [Homo sapiens] | 5e−007 |
| 2180 | 1085573 | microtubule-associated protein MAP2 - rat molecular weight | 3.8 |
| | | microtubule-associated protein cell line, Peptide Partial, 381 aa] | |
| 2181 | 104623 | collagen, corneal - chicken (fragment) | 0.097 |
| 2182 | 2981631 | (AB012223) ORF2 [Canis familiaris] | 1e−010 |
| 2183 | 2493820 | CYTOCHROME C OXIDASE POLYPEPTIDE I ornatipinnis] | 3e−011 |
| 2184 | 2494737 | HYPOTHETICAL 71.7 KD PROTEIN F52H3.2 IN | 3e−046 |
| | | CHROMOSOME II >gi\|3877390\|emb\|CAA91322\| | |
| 2185 | 1709997 | DNA REPAIR PROTEIN RAD18 pombe] | 0.64 |
| 2186 | 59977 | (Z14310) tripartite fusion transcript PLA2L | 1e−006 |
| 2187 | 2072967 | (U93570) putative p150 [Homo sapiens] | 5e−007 |
| 2188 | 1800307 | (U83883) p105 coactivator [Rattus norvegicus] | 4e−010 |
| 2189 | 728831 | !!!! ALU SUBFAMILY J WARNING ENTRY | 4e−009 |
| 2190 | 2245560 | (AF004339) cytochrome c oxidase subunit II [Homo sapiens] | 9e−007 |
| 2191 | 3875269 | (Z77655) Weak similarity to Human calcium-dependent proetase | 0.2 |
| | | (SW:CANS_HUMAN) | |
| 2192 | 728835 | !!!! ALU SUBFAMILY SC WARNING ENTRY | 2e−010 |
| 2193 | 106322 | hypothetical protein (L1H 3′ region) - human | 3e−013 |
| 2194 | 2072967 | (U93570) putative p150 [Homo sapiens] | 1e−015 |
| 2196 | 189086 | (M18728) ORF1 [Homo sapiens] | 0.0005 |
| 2197 | 2605776 | (AF027404) signal recognition particle 14a [Macaca radiata] | 0.0003 |
| 2202 | 339777 | (M80344) ORF2 contains a reverse transcriptase domain. | 5e−017 |
| 2203 | 4539386 | (AL035526) extensin-like protein | 1 |
| 2204 | 3043654 | (AB011137) KIAA0565 protein [Homo sapiens] | 3e−020 |
| 2206 | 3929396 | HYPOTHETICAL 47.8 KD PROTEIN F57B9.5 IN | 0.1 |
| | | CHROMOSOME III >gi\|532824 (U13876) F57B9.5 gene product | |
| 2207 | 1769472 | (U15780) p82 [Homo sapiens] | 9e−037 |
| 2208 | 728837 | !!!! ALU SUBFAMILY SQ WARNING ENTRY | 8e−015 |
| 2209 | 2506089 | 26S PROTEASE REGULATORY SUBUNIT 7 | 1e−016 |
| 2210 | 1073466 | aldehyde dehydrogenase (EC 1.2.1.-) aldB - Escherichia coli | 1.4 |
| | | >gi\|912476 (U00039) No definition line found [Escherichia coli] | |
| | | >gi\|1790014 (AE000436) aldehyde dehydrogenase B (lactaldehyde | |
| 2211 | 2072960 | (U93568) p40 [Homo sapiens] | 3e−005 |
| 2212 | 4009460 | (AF039401) calcium-dependent chloride channel-1 [Homo sapiens] | 2e−020 |
| 2214 | 100687 | hydroxyproline-rich glycoprotein - rice glycoprotein [Oryza sativa] | 8.7 |
| 2215 | 3043616 | (AB011118) KIAA0546 protein [Homo sapiens] | 2e−010 |
| 2216 | 126296 | LINE-1 REVERSE TRANSCRIPTASE HOMOLOG protein | 6e−014 |
| | | [Nycticebus coucang] | |
| 2218 | 91043 | LINE-1 hypothetical protein - mouse (fragment) musculus] | 3e−005 |
| 2220 | 4106562 | (Z83819) dJ146H21.2 (similar to CYTOCHROME B-245 HEAVY | 5e−061 |
| | | CHAIN) [Homo sapiens] | |
| 2221 | 631507 | zinc-containing protein - human | 0.0001 |
| 2223 | 2072972 | (U93572) putative p150 [Homo sapiens] | 3e−009 |
| 2224 | 3123174 | HYPOTHETICAL PROTEIN | 1e−012 |
| 2226 | 126296 | LINE-1 REVERSE TRANSCRIPTASE HOMOLOG protein | 1e−007 |
| | | [Nycticebus coucang] | |
| 2227 | 2981631 | (AB012223) ORF2 [Canis familiaris] | 3e−013 |
| 2228 | 109930 | GTP-binding protein rah - mouse (fragment) G-protein=low- | 4e−020 |
| | | molecular-weight GTP-binding protein GTP-binding protein [Mus | |
| 2229 | 2981631 | (AB012223) ORF2 [Canis familiaris] | 5e−007 |
| 2230 | 1698455 | (U49974) mariner transposase [Homo sapiens] | 5e−007 |
| 2231 | 2289235 | (U95016) myocyte nuclear factor-beta [Mus musculus] | 8e−015 |
| 2232 | 2827495 | (AL009196) 1-evidence=predicted by content; 1- | 1.9 |
| | | method=genefinder; 084; 1-evidence_end; 2-evidence=predicted by | |
| | | match; 2-match_accession=AA391048; 2- | |
| | | match_description=LD09991 .5prime LD Drosophila melanogaster | |
| 2233 | 2465330 | (U92818) unnamed HERV-H protein [Homo sapiens] | 1e−011 |
| 2234 | 2135837 | nuclear protein H731 - human >gi\|1825562 | 4e−014 |
| 2235 | 4164448 | (AF044958) NADH:ubiquinone oxidoreductase ASHI subunit | 2e−025 |
| 2236 | 4506077 | protein kinase C substrate 80 K-H | 4e−031 |
| | | >gi\|120629\|sp\|P14314\|G19P_HUMAN PROTEIN KINASE C | |
| | | SUBSTRATE, 80 KD PROTEIN, HEAVY CHAIN (PKCSH) (80 K- | |
| | | H PROTEIN) >gi\|105167\|pir\|\|A32469 80 K protein H precursor 80 K- | |
| 2237 | 2981631 | (AB012223) ORF2 [Canis familiaris] | 0.007 |
| 2238 | 1176422 | (U43194) rhophilin [Mus musculus] | 0.81 |
| 2239 | 4263743 | (AC004923) similar to UNC-93; similar to U89424 (PID:g3642687) | 3e−041 |
| | | [Homo sapiens] | |
| 2240 | 106322 | hypothetical protein (L1H 3′ region - human | 2e−018 |
| 2241 | 2352427 | (AF004161) peroxisomal Ca-dependent solute carrier | 1e−044 |
| 2242 | 4104400 | (AF035401) exocellobiohydrolase precursor [Piromyces rhizinflata] | 4.2 |
| 2243 | 158154 | (M81959) POU domain protein [Drosophila melanogaster] | 3 |
| 2244 | 114858 | MAGNESIUM-PROTOPORPHYRIN IX MONOMETHYL ESTER | 2.2 |
| | | OXIDATIVE CYCLASE 66 KD SUBUNIT Rhodobacter capsulatus | |
| | | >gi\|46113\|emb\|CAA77530\|(Z11165) 575 aa (66 kD) oxidative | |
| 2245 | 2352427 | (AF004161) peroxisomal Ca-dependent solute carrier | 3e−044 |
| 2246 | 116746 | PROBABLE COAT PROTEIN virus >gi\|58812\|emb\|CAA29526\| | 4.3 |
| | | (X06166) ORF IV (AA 1-489) | |
| 2247 | 2072967 | (U93570) putative p150 [Homo sapiens] | 6e−008 |
| 2248 | 2137494 | M-sema F protein precusor - mouse homolog=M-Sema F [mice, | 5.5 |
| | | neonatal brain, Peptide, 834 aa] | |
| 2249 | 1709971 | 60S RIBOSOMAL PROTEIN L10A (CSA-19) | 1e−015 |
| 2250 | 1498225 | (Y07569) PHAP12a protein [Homo sapiens] | 4e−012 |
| 2251 | 1711550 | TRANSLOCON-ASSOCIATED PROTEIN, DELTA SUBUNIT | 3e−012 |
| | | PRECURSOR (TRAP-DELTA) (SIGNAL SEQUENCE RECEPTOR | |
| | | DELTA SUBUNIT) (SSR-DELTA) unnamed protein product [Homo | |
| | | sapiens] >gi\|1302656 sapiens] >gi\|1673433\|emb\|CAA92215\| | |
| 2252 | 126296 | LINE-1 REVERSE TRANSCRIPTASE HOMOLOG protein | 1e−013 |
| | | [Nycticebus coucang] | |
| 2253 | 4502643 | chaperonin containing T-complex subunit 6 | 1e−014 |
| | | >gi\|730922\|sp\|P40227\|TCPZ_HUMAN T-COMPLEX PROTEIN 1, | |
| | | ZETA SUBUNIT (TCP-1-ZETA) (CCT-ZETA) (TCP20) sapiens] | |
| 2254 | 2737894 | (U59151) Cbf5p homolog [Homo sapiens] | 4e−070 |
| 2255 | 1076557 | extensin-like protein - cowpea (fragment) | 0.6 |
| 2257 | 3878245 | (Z69664) Similarity to Yeast cell divison control protein cdc25 | 9.2 |
| | | (SW:CC@%_SACKL); cDNA EST EMBL:D32475 comes from this | |
| | | gene; cDNA EST EMBL:D34376 comes from this gene; cDNA EST | |
| | | EMBL:D35124 comes from this gene; cDNA EST EMBL:D37... | |
| 2258 | 4505067 | MAD2 (mitotic arrest deficient, yeast, homolog)-like 1 >gi\|950199 | 2e−009 |
| | | (U31278) mitotic feedback control protein Madp2 homolog [Homo | |
| 2259 | 126296 | LINE-1 REVERSE TRANSCRIPTASE HOMOLOG protein | 4e−018 |
| | | [Nycticebus coucang] | |
| 2260 | 4507669 | tumor protein, translationally-controlled 1 CONTROLLED TUMOR | 0.043 |
| | | PROTEIN (TCTP) (P23) factor - human >gi\|37496\|emb\|CAA34200\| | |
| | | (X16064) tumor protein (AA 1-172) [Homo sapiens] | |
| 2261 | 66499 | arylamine N-acetyltransferase (EC 2.3.1.5), monomorphic - rabbit | 1.8 |
| | | >gi\|217728\|dbj\|BAA00989\|(D10108) arylamine N-acetyltransferase | |
| | | [Oryctolagus cuniculus] | |
| 2262 | 733532 | (U23420) unknown [Drosophila melanogaster] | 0.51 |
| 2263 | 3041664 | DEOXYURIDINE 5′-TRIPHOSPHATE | 2e−029 |
| | | NUCLEOTIDOHYDROLASE PRECURSOR (DUTPASE) (DUTP | |
| | | PYROPHOSPHATASE) >gi\|2443580 (AF018432) dUTPase [Homo | |
| | | sapiens] >gi\|2735292 (U90223) deoxyuridine triphosphate | |
| 2264 | 2136246 | tastin - human >gi\|905356 (U04810) tastin | 1.1 |
| 2266 | 126295 | LINE-1 REVERSE TRANSCRIPTASE HOMOLOG | 0.0002 |
| 2267 | 825671 | (X16934) B23 nucleophosmin (280 AA) [Homo sapiens] | 4e−013 |
| 2268 | 2231019 | (Z97207) B-IND1 protein [Mus musculus] | 2e−023 |
| 2269 | 4502189 | aquaporin 8 sapiens] | 1e−014 |
| 2270 | 126296 | LINE-1 REVERSE TRANSCRIPTASE HOMOLOG protein | 5e−015 |
| | | [Nycticebus coucang] | |
| 2271 | 126296 | LINE-1 REVERSE TRANSCRIPTASE HOMOLOG protein | 5e−015 |
| | | [Nycticebus coucang] | |
| 2272 | 218564 | (D90358) HB-SOD [Schizosaccharomyces pombe] | 4e−024 |
| 2274 | 1352736 | PELOTA PROTEIN >gi\|973224 (U27197) pelota [Drosophila | 3e−038 |
| 2275 | 102177 | hypothetical protein (ribosomal RNA repeat region) - Giardia lamblia | 1.3 |
| 2276 | 113668 | !!!! ALU CLASS C WARNING ENTRY !!!! | 0.13 |
| 2277 | 961444 | (D63876) KIAA0154 gene product is related to mouse gamma | 7e−026 |
| | | adaptin. [Homo sapiens] | |
| 2278 | 3183217 | HYPOTHETICAL PROTEIN KIAA0103 sapiens] | 5e−017 |
| 2282 | 2072972 | (U93572) putative p150 [Homo sapiens] | 4e−017 |
| 2283 | 961444 | (D63876) KIAA0154 gene product is related to mouse gamma | 6e−028 |
| | | adaptin. [Homo sapiens] | |
| 2285 | 4586287 | (AB004794) DUF140 [Xenopus laevis] | 0.005 |
| 2286 | 3879684 | (Z74042) predicted using Genefinder; Similarity to Haemophilus 3- | 0.0002 |
| | | oxoacyl-(acyl-carrier protein) reductase (SW:FABG_HAEIN); cDNA | |
| | | EST yk470b2.3 comes from this gene; cDNA EST yk470b2.5 comes | |
| | | from this gene [Caenorhabditis elegans] | |
| 2287 | 131786 | RAS-RELATED PROTEIN RAB-1A protein ypt1 - mouse | 1e−017 |
| | | >gi\|2144599\|pir\|\|TVHUYP GTP-binding protein Rab1 - human | |
| | | >gi\|2144600\|pir\|\|TVDGYP GTP-binding protein Rab1 - dog | |
| | | >gi\|55457\|emb\|CAA68284\|(Y00094) Ypt1 protein (AA 1-205) [Mus | |
| | | musculus] >gi\|550060 (M28209) GTP | |
| 2288 | 4115532 | (AB012043) NBR13 [Homo sapiens] | 0.69 |
| 2289 | 4586287 | (AB004794) DUF140 [Xenopus laevis] | 1e−007 |
| 2290 | 126296 | LINE-1 REVERSE TRANSCRIPTASE HOMOLOG protein | 9e−020 |
| | | [Nycticebus coucang] | |
| 2293 | 2981950 | Pathogenesis-Related Protein 5d From Nicotiana Tabacum | 7.8 |
| 2294 | 482300 | cell surface antigen CD34 precursor - human | 1e−019 |
| 2295 | 104623 | collagen, corneal - chicken (fragment) | 0.14 |
| 2296 | 4191746 | (L30113) alcohol dehydrogenase; ADH [Papio hamadryas] | 2e−018 |
| 2297 | 1518609 | (U57715) FGF receptor activating protein FRAG1 [Rattus | 1e−020 |
| 2298 | 4502953 | collagen, type IV, alpha 4 CHAIN PRECURSOR | 0.025 |
| | | >gi\|1360674\|pir\|\|CGHU1B collagen alpha 4(IV) chain precursor- | |
| | | human >gi\|574806\|emb\|CAA56943\|IV [Homo sapiens] | |
| 2299 | 2565196 | (AF000381) non-functional folate binding protein [Homo sapiens] | 1e−006 |
| 2300 | 2492620 | NEURONAL ACETYLCHOLINE RECEPTOR PROTEIN, ALPHA- | 1e−009 |
| | | 6 CHAIN PRECURSOR >gi\|1458118 (U62435) nicotinic | |
| | | acetylcholine receptor alpha6 subunit precursor [Homo sapiens] | |
| | | >gi\|2815225\|emb\|CAA76155\|precursor [Homo sapiens] | |
| 2301 | 95095 | hypothetical protein 2 - Agrobacterium tumefaciens | 3.3 |
| | | >gi\|39102\|emb\|CAA37890.1\|(X53945) ORF2 | |
| 2302 | 1765938 | (U47077) DNA-dependent protein kinase catalytic subunit | 6e−021 |
| 2303 | 2493783 | COLLAGEN ALPHA 4(IV) CHAIN bovine (fragment) | 3 |
| 2304 | 2645205 | (U63648) p160 myb-binding protein [Mus musculus] | 3e−029 |
| 2305 | 2645205 | (U63648) p160 myb-binding protein [Mus musculus] | 9e−030 |
| 2306 | 2495322 | HOMEOBOX PROTEIN HOX-A9 | 8e−014 |
| 2307 | 116509 | CALCYCLIN (PROLACTIN RECEPTOR ASSOCIATED | 4e−006 |
| | | PROTEIN) (PRA) (GROWTH FACTOR-INDUCIBLE PROTEIN | |
| | | 2A9) (S100 CALCIUM-BINDING PROTEIN A6) put. calcyclin; | |
| 2308 | 4502991 | cytochrome c oxidase subunit VIIb | 0.002 |
| | | >gi\|461804\|sp\|P24311\|COXM_HUMAN CYTOCHROME C | |
| | | OXIDASE POLYPEPTIDE VIIB PRECURSOR 1.9.3.1) chain VIIb- | |
| | | human >gi\|30151\|emb\|CAA78613\|sapiens] | |
| 2309 | 4507669 | tumor protein, translationally-controlled 1 CONTROLLED TUMOR | 6e−020 |
| | | PROTEIN (TCTP) (P23) factor - human >gi\|37496\|emb\|CAA34200\| | |
| | | (X16064) tumor protein (AA 1-172) [Homo sapiens] | |
| 2311 | 4507207 | sorcin sorcin [Homo sapiens] >gi\|1094394\|prf\|\|2106141A sorcin | 2e−018 |
| 2312 | 117061 | CYTOCHROME C OXIDASE POLYPEPTIDE III chain III - human | 3e−017 |
| | | mitochondrion(SGC1) oxidase III [Homo sapiens] | |
| 2313 | 1709972 | 60S RIBOSOMAL PROTEIN L10A (CSA-19) | 5e−013 |
| 2314 | 4454698 | (AF070661) HSPC005 [Homo sapiens] | 3e−014 |
| 2315 | 1885381 | (U77665) RNaseP protein P30 [Homo sapiens] | 1e−020 |
| 2316 | 209383 | (M27786) MS-2 pol-stefin B fusion protein [Artificial gene] | 7e−008 |
| 2318 | 631507 | zinc-containing protein - human | 0.03 |
| 2319 | 4502991 | cytochrome c oxidase subunit VIIb | 5e−013 |
| | | >gi\|461804\|sp\|P24311\|COXM_HUMAN CYTOCHROME C | |
| | | OXIDASE POLYPEPTIDE VIIB PRECURSOR 1.9.3.1) chain VIIb- | |
| | | human >gi\|30151\|emb\|CAA78613\|sapiens] | |
| 2320 | 87765 | hypothetical L1 protein (third intron of gene TS) - human | 2e−015 |
| | | >gi\|364964\|prf\|\|1510254A L1 repetitive element ORF [Homo | |
| 2321 | 129379 | MITOCHONDRIAL MATRIX PROTEIN P1 PRECURSOR (P60 | 8e−016 |
| | | LYMPHOCYTE PROTEIN) (60 KD CHAPERONIN) PROTEIN) | |
| | | (HUCHA60) >gi\|107086\|pir\|\|A32800 heat shock protein 60 precursor- | |
| | | human >gi\|190127 (M22382) mitochondrial matrix protein [Homo | |
| 2322 | 2231019 | (Z97207) B-IND1 protein [Mus musculus] | 6e−022 |
| 2323 | 4154176 | (U96639) ATPase subunit 6 [Canis familiaris] | 0.007 |
| 2324 | 2575807 | (D49692) adenylate cyclase [Spirulina platensis] | 4.4 |
| 2325 | 4502991 | cytochrome c oxidase subunit VIIb | 5e−007 |
| | | >gi\|461804\|sp\|P24311\|COXM_HUMAN CYTOCHROME C | |
| | | OXIDASE POLYPEPTIDE VIIB PRECURSOR 1.9.3.1) chain VIIb- | |
| | | human >gi\|30151\|emb\|CAA78613\|sapiens] | |
| 2326 | 2119918 | P43 - human >gi\|833999\|bbs\|160014 (S75463) P43=mitochondrial | 3e−020 |
| | | elongation factor homolog [human, liver, Peptide, 452 aa] [Homo | |
| 2327 | 4503145 | cathepsin E precursor - human >gi\|181194 (J05036) cathepsin E | 1e−041 |
| | | precursor [Homo sapiens] >gi\|181205 (M84424) cathepsin E | |
| 2328 | 4502189 | aquaporin 8 sapiens] | 2e−023 |
| 2329 | 4502189 | aquaporin 8 sapiens] | 2e−026 |
| 2330 | 2306969 | (AF007860) xl-Mago [Xenopus laevis] | 2e−037 |
| 2333 | 3970731 | (AJ006480) SBT4B protein [Lycopersicon esculentum] | 9 |
| 2334 | 2736524 | (AF039052) Similar to inosine monophosphate dehydrogenase; | 2.7 |
| | | coded for by C. elegans cDNA CEMSF04F; coded for by C. elegans | |
| | | cDNA yk247b12.3; coded for by C. elegans cDNA cm20d8; coded | |
| | | for by C. elegans cDNA yk247b12.5; coded for by C. elegans... | |
| 2335 | 1085957 | hypothetical protein Y - Streptomyces nogalater | 1.1 |
| | | >gi\|2147591\|pir\|\|S69232 hypothetical protein Y | |
| 2336 | 3183217 | HYPOTHETICAL PROTEIN KIAA0103 sapiens] | 3e−021 |
| 2337 | 2494312 | TRANSLATION INITIATION FACTOR EIF-2B GAMMA | 3e−037 |
| | | SUBUNIT (EIF-2B GDP-GTP EXCHANGE FACTOR) subunit | |
| 2338 | 337930 | (M22146) scar protein [Homo sapiens] | 1e−024 |
| 2339 | 68891 | transforming protein ets - chicken >gi\|211753 | 2e−007 |
| 2340 | 126296 | LINE-1 REVERSE TRANSCRIPTASE HOMOLOG protein | 9e−017 |
| | | [Nycticebus coucang] | |
| 2341 | 4507517 | tight junction protein 1 (zona occludens 1) | 9e−023 |
| | | >gi\|585098\|sp\|Q07157\|ZO1_HUMAN TIGHT JUNCTION | |
| | | PROTEIN ZO-1 (TIGHT JUNCTION PROTEIN 1) human | |
| | | >gi\|292938 (L14837) tight junction (zonula occludens) protein ZO-1 | |
| 2343 | 106851 | keratin 18, cytoskeletal - human (fragment) sapiens] | 4e−023 |
| 2344 | 1723438 | HYPOTHETICAL 52.3 KD PROTEIN C56F8.06C IN | 7.5 |
| | | CHROMOSOME I PRECURSOR | |
| 2345 | 2231019 | (Z97207) B-IND1 protein [Mus musculus] | 7e−022 |
| 2346 | 2047300 | (L40459) latent transforming growth factor-beta binding protein [Mus | 0.48 |
| | | musculus] | |
| 2347 | 129383 | PROBABLE RNA-DEPENDENT HELICASE P68 human | 2e−023 |
| | | >gi\|35220\|emb\|CAA36324\|(X52104) p68 protein (AA 1-614) [Homo | |
| | | sapiens] >gi\|38318\|emb\|CAA33751\|(X15729) protein p68 (AA 1- | |
| | | 614) [Homo sapiens] >gi\|2599360 | |
| 2351 | 4502411 | BCL2-interacting killer BCL-2 INTERACTING KILLER | 3e−025 |
| | | (APOPTOSIS INDUCER NBK) (BP4) sapiens] >gi\|1235989 | |
| 2352 | 2072961 | (U93568) putative p150 [Homo sapiens] | 2e−014 |
| 2354 | 2306969 | (AF007860) xl-Mago [Xenopus laevis] | 3e−041 |
| 2355 | 1872498 | (U74297) PiUS [Oryctolagus cuniculus] | 2e−033 |
| 2356 | 1783123 | (AB000170) endopeptidase 24.16 type M3 endopeptidase 24.16 type | 1e−029 |
| | | M3 [Sus scrofa] type M3 [Sus scrofa] >gi\|1783130\|dbj\|BAA19065\| | |
| | | type M3 [Sus scrofa] >gi\|1783134\|dbj\|BAA19067\|type M3 [Sus | |
| 2357 | 2306969 | (AF007860) xl-Mago [Xenopus laevis] | 2e−041 |
| 2358 | 1872498 | (U74297) PiUS [Oryctolagus cuniculus] | 6e−034 |
| 2359 | 4519602 | (AB017563) IGSF4 [Homo sapiens] | 3e−041 |
| 2360 | 1944330 | (D49545) KIFC2 [Mus musculus] | 2e−019 |
| 2361 | 4502189 | aquaporin 8 sapiens] | 6e−040 |
| 2362 | 4502189 | aquaporin 8 sapiens] | 2e−041 |
| 2363 | 1537070 | (U63840) nucleoporin p54 [Rattus norvegicus] | 2e−040 |
| 2364 | 3024124 | HOMEOBOX PROTEIN MEIS3 | 8e−030 |
| 2365 | 107215 | notch protein homolog TAN-1 precursor - human | 5e−040 |
| 2366 | 2306969 | (AF007860) xl-Mago [Xenopus laevis] | 7e−054 |
| 2367 | 2306969 | (AF007860) xl-Mago [Xenopus laevis] | 2e−054 |
| 2368 | 4464284 | (AC007136) Putative map kinase interacting kinase [Homo sapiens] | 7e−045 |
| | | [Homo sapiens] | |
| 2369 | 4502741 | cyclin-dependent kinase 6 KINASE 6 (KINASE PLSTIRE) | 1e−060 |
| | | >gi\|107662\|pir\|\|S23387 protein kinase (EC 2.7.1.37) cdk6 - human | |
| | | >gi\|4389286\|pdb\|1BI8\|A Chain A, Mechanism Of G1 Cyclin | |
| | | Dependent Kinase Inhibition From The Structures Cdk6-P19ink4d | |
| 2371 | 2496815 | HYPOTHETICAL 68.1 KD PROTEIN B0304.7 IN | 0.59 |
| | | CHROMOSOME II >gi\|1041881 (U39472) similar to f44f4.5 | |
| 2372 | 2496815 | HYPOTHETICAL 68.1 KD PROTEIN B0304.7 IN | 0.56 |
| | | CHROMOSOME II>gi\|1041881 (U39472) similar to f44f4.5 | |
| 2373 | 3327226 | (AB014606) KIAA0706 protein [Homo sapiens] | 1e−031 |
| 2374 | 3327226 | (AB014606) KIAA0706 protein [Homo sapiens] | 2e−034 |
| 2375 | 3327226 | (AB014606) KIAA0706 protein [Homo sapiens] | 2e−038 |
| 2376 | 2231019 | (Z97207) B-IND1 protein [Mus musculus] | 2e−039 |
| 2377 | 3327226 | (AB014606) KIAA0706 protein [Homo sapiens] | 4e−043 |
| 2378 | 417743 | NEUROLYSIN PRECURSOR (NEUROTENSIN | 1e−047 |
| | | ENDOPEPTIDASE) (MITOCHONDRIAL OLIGOPEPTIDASE M) | |
| | | ANGIOTENSIN-BINDING PROTEIN) (SABP) protein - pig | |
| | | >gi\|217709\|dbj\|BAA01949\|(D11336) soluble angiotesin-binding | |
| | | protein [Sus scrofa] type M1 [Sus scrofa] >gi\|1871389\|dbj\|BAA1 | |
| 2379 | 1783127 | (AB000172) endopeptidase 24.16 type M2 endopeptidase 24.16 type | 7e−050 |
| | | M2 [Sus scrofa] | |
| 2380 | 2494312 | TRANSLATION INITIATION FACTOR EIF-2B GAMMA | 7e−056 |
| | | SUBUNIT (EIF-2B GDP-GTP EXCHANGE FACTOR) subunit | |
| 2381 | 1085499 | CDC4 repeat unit-containing protein - mouse | 4e−056 |
| 2382 | 4092846 | (AB019987) chromosome-associated polypeptide-C [Homo sapiens] | 4e−058 |
| 2383 | 4103446 | (AF023265) NAD+-specific isocitrate dehydrogenase beta subunit | 5e−059 |
| | | isoform A [Homo sapiens] | |
| 2384 | 1353709 | (U42385) FIN16 gene product [Mus musculus] | 8e−061 |
| 2385 | 4106818 | (AF083395) phospholipase A2-activating protein [Homo sapiens] | 5e−061 |
| 2386 | 473407 | (U08215) NST-1 [Mus musculus] | 2e−061 |
| 2387 | 4103446 | (AF023265) NAD+- specific isocitrate dehydrogenase beta subunit | 6e−062 |
| | | isoform A [Homo sapiens] | |
| 2388 | 1537070 | (U63840) nucleoporin p54 [Rattus norvegicus] | 2e−062 |
| 2389 | 3851584 | (AF092563) chromosome-associated protein-E [Homo sapiens] | 7e−063 |
| 2390 | 3851584 | (AF092563) chromosome-associated protein-E [Homo sapiens] | 6e−063 |
| 2391 | 3493209 | (AF052577) aldo-keto reductase [Homo sapiens] | 3e−064 |
| 2392 | 4502741 | cyclin-dependent kinase 6 KINASE 6 (KINASE PLSTIRE) | 5e−065 |
| | | >gi\|107662\|pir\|\|S23387 protein kinase (EC 2.7.1.37) cdk6 - human | |
| | | >gi\|4389286\|pdb\|1BI8\|A Chain A, Mechanism Of G1 Cyclin | |
| | | Dependent Kinase Inhibition From The Structures Cdk6-P19ink4d | |
| 2393 | 3493209 | (AF052577) aldo-keto reductase [Homo sapiens] | 7e−066 |
| 2394 | 4165018 | (D89053) Acyl-CoA synthetase 3 [Homo sapiens] | 3e−068 |
| 2395 | 4106818 | (AF083395) phospholipase A2-activating protein [Homo sapiens] | 1e−068 |
| 2396 | 4165018 | (D89053) Acyl-CoA synthetase 3 [Homo sapiens] | 1e−070 |

[0297] TABLE 2A
Nearest Neighbor (BlastN vs. GenBank)

| SEQ ID | ACCESSION | DESCRIPTION | P VALUE | |
|---|---|---|---|---|
| 101 | U73106 | Liriodendron tulipifera high-pI laccase (LAC2-4) mRNA, | 4.9 | |
| 102 | M63897 | Bacillus thuringiensis insecticidal crystal protein (CryIF) | 4.8 | |
| | | gene, complete cds. | | |
| 103 | X75014 | M. musculus Phox2 mRNA for homeodomain protein | 4.4 | |
| 104 | X77320 | A. officinalis L. unknown mRNA | 4.1 | |
| 105 | M64982 | Human fibrinogen alpha chain gene, complete mRNAs. | 4.1 | |
| 106 | U28241 | Gallus gallus collapsin-3 mRNA, partial cds. | 4.1 | |
| 107 | M36860 | Human elastin mRNA, complete cds. | 4.1 | |
| 108 | X99641 | M. musculus mRNA for HP1 alpha protein | 4.1 | |
| 109 | X92557 | S. erythraea pccB, bcpA2, and orfX genes | 4 | |
| 110 | M21514 | Rinderpest virus fusion protein mRNA, complete cds. 4 | | |
| 111 | M64982 | Human fibrinogen alpha chain gene, complete mRNAs. | 4 | |
| 112 | D87218 | Trypanosoma cruzi mRNA, partial cds, clone:TcEST002 | 4 | |
| 113 | M27273 | E. coli rafA, rafB, and rafD genes encoding Alpha-D- | 3.9 | |
| | | galactosidase, raf-permease, and raf-invertase, complete cds. | | |
| 114 | U50065 | Caenorhabditis elegans cosmid T23A7. | 3.9 | |
| 115 | X76186 | Rinderpest virus (REOK vaccine) mRNA for matrix protein | 3.9 | |
| 116 | L05165 | Gorilla gorilla glycophorin-gene related sequence. | 3.9 | |
| 117 | M77212 | Apis koschevnikovi niltochondrial cytocbrome oxidase II | 3.9 | |
| | | gene, complete cds. | | |
| 118 | U64453 | Human ELK1 pseudogene (ELK2) and immunoglobulin | 3.9 | |
| | | heavy chain gamma pseudogene (IGHGP) | | |
| 119 | M87502 | Rotavirus SA114F nonstructural protein 34 (NS34) mRNA, | 3.9 | |
| | | complete cds. | | |
| 120 | L24376 | Bacillus subtilis ribosomal protein L7/12 (rplL) gene, beta | 3.9 | |
| | | subunit of RNA polymerase (rpoBC) gene, 3′ end, complete | | |
| 121 | U97143 | Rattus norvegicus RET ligand 2 (RETL2) mRNA, complete | 3.9 | |
| 122 | M95610 | Human alpha 2 type IX collagen (COL9A2) mRNA, partial | 3.9 | |
| 123 | M21890 | Human alpha-1-antitrypsin like (PIL) pseudogene, exon 2. | 3.9 | |
| 124 | NM_002205.1 | Homo sapiens integrin, alpha 5 (fibronectin receptor, alpha | 3.9 | |
| | | polypeptide) (ITGA5) mRNA > ::emb\|X062S6.1\|HSFNRA | | |
| | | Human mRNA for integrin alpha 5 subunit | | |
| 125 | U38949 | Gallus gallus C-protein mRNA, complete cds. | 3.9 | |
| 126 | U04985 | Simian immunodeficiency virus clone SIVsm62J vpx gene, | 3.9 | |
| | | partial cds, env, nef, tat and rev genes, complete cds. | | |
| 127 | U05237 | Human fetal Alz-50-reactive clone 1 (FAC1) mRNA, | 3.9 | |
| 128 | X96616 | P. primaurelia gene encoding 156D surface antigen | 3.8 | |
| 129 | U31929 | Human orphan nuclear receptor (DAX1) gene, complete cds | 3.8 | |
| 130 | X13523 | Yeast CBS2 gene for cytocbrome b translational activator | 3.8 | |
| 131 | M57769 | Chinese vaccinia virus I segment DNA fragment. | 3.8 | |
| 132 | U08443 | HIV-1 isolate 652 clone 11 from Haiti, envelope | 3.8 | |
| | | glycoprotein partial cds. | | |
| 133 | L39876 | Caldicellulosiruptor saccharolyticus alpha-dextrin 6- | 3.8 | |
| | | glucanohydrolase (pu1A) and pepX genes, complete cds and | | |
| 134 | M20363 | Soybean heat-shock protein (Gmhsp26-A) gene, complete | 3.8 | |
| 135 | J02836 | Mouse beta-glucuronidase gene, complete cds.. | 3.8 | |
| 136 | U64880 | Eubacterium thermomarinus ribonuclease P RNA | 3.8 | |
| 137 | X93520 | E. caballus microsatellite DNA marker (clone ASB6) | 3.8 | |
| 138 | Z83151 | H. sapiens Fanconi anaemia group A gene, exon 6 | 3.8 | |
| 139 | D28484 | Aspergillus oryzae pgkA gene for phosphoglycerate kinase, | 3.8 | |
| | | complete cds > ::dbj\|E04898\|E04898 gDNA encoding | | |
| 140 | Z28091 | S. cerevisiae chromosome XI reading frame ORF YKL091c | 3.8 | |
| 141 | V01291 | Yeast gene for alcohol dehydrogenase | 3.8 | |
| 142 | U44843 | Lactococcus lactis plasmid pND324, complete sequence | 3.8 | |
| 143 | M13496 | Chicken type X collagen gene. | 3.8 | |
| 144 | Y14946 | Homo sapiens mRNA for SPIN protein | 3.8 | |
| 145 | U94776 | Human muscle glycogen phosphorylase (PYGM) gene, | 3.8 | |
| | | exons 6 through 17 | | |
| 146 | U43844 | Mus musculus cyclin D3 gene, complete cds | 3.8 | |
| 147 | X03431 | Drosophila melanogaster transposable element 297 | 3.8 | |
| 148 | U05237 | Human fetal Alz-50-reactive clone 1 (FAC1) mRNA, | 3.8 | |
| 149 | U92856 | Comptonia peregrina maturase (matK) gene, chloroplast | 3.8 | |
| | | gene encoding chloroplast protein, complete cds | | |
| 150 | X94165 | Human papillomavirus type 73 E6, E7, E1, E2, E4, L2, and | 3.7 | |
| 151 | U47875 | Drosophila azteca NDSSC 14012-0171.6 glycerolphosphate | 3.7 | |
| | | dehydrogenase (Gpd) gene, partial cds | | |
| 152 | X02882 | Human HLA class II alpha chain gene DZ-alpha | 3.7 | |
| 153 | AF005932 | Clavispora opuntiae Spt3 (SPT3) gene, complete cds | 3.7 | |
| 154 | Z11840 | D. melanogaster hedgehog gene DNA | 3.7 | |
| 155 | U06745 | Arabidopsis thaliana ecotype Landsberg K+ transport system | 3.7 | |
| | | AKT1 gene, complete cds. | | |
| 156 | U63362 | Unidentified crenarchaeote 16S ribosomal RNA gene, 5′ | 3.7 | |
| | | partial sequence | | |
| 157 | D30810 | Wheat gene for transcription factor HBP-1b(c38), final | 3.7 | |
| | | exon, partial cds | | |
| 158 | X56089 | X. laevis mRNA for alpha-subunit of G-protein, type G- | 3.7 | |
| 159 | X07701 | Chironomus tentans Balbiani ring mRNA BR 2.1 3′-end | 3.7 | |
| 160 | X64649 | G. gallus mRNA for restrictin | 3.7 | |
| 161 | Y13426 | Homo sapiens TCRDV2 gene, partial | 3.7 | |
| 162 | Y14443 | Homo sapiens mRNA for zinc finger protein | 3.7 | |
| 163 | U92794 | Mus musculus alpha glucosidase II beta subunit m RNA, | 3.7 | |
| 164 | Y09480 | A. europaeus genes encoding dehydrogenase and cytochrome | 3.7 | |
| 165 | NM_001659.1 | Homo sapiens ADP-ribosylation factor 3 (ARF3) mRNA> | 3.7 | |
| | | gb\|M74491\|HUMADPRF3A Human ADP-ribosylation | | |
| | | factor 3 mRNA, complete cds. | | |
| 166 | L20893 | Rice yellow mottle virus complete genome. | 3.7 | |
| 167 | AF019759 | Canis familiaris beta-glucuronidase (GUSB) mRNA, | 3.7 | |
| 168 | U62587 | Cricetulus griseus beta-1,6-N-acetylglucosaminyltransferase | 3.7 | |
| | | Lec4A cell line point mutant mRNA, complete cds | | |
| 169 | D50085 | Cucumis sativus mRNA for NADPH-protocblorophyllide | 3.7 | |
| | | oxidoreductase, complete cds | | |
| 170 | M81890 | Human interleukin 11 (IL11) gene, complete mRNA. | 3.7 | |
| 171 | M57765 | Human interleukin 11 mRNA, complete cds. | 3.7 | |
| 172 | X55880 | T. reesei ura3 (OMPdecase) gene for orotidine-5′-phosphate | 3.6 | |
| | | decarboxylase (EC 4.1.1.23) | | |
| 173 | J03028 | P. falciparum dihydrofolate reductase-thymidylate synthase | 3.6 | |
| | | gene, complete cds. | | |
| 174 | AF000949 | Canis familiaris keratin (KRT9) gene, complete cds | 3.6 | |
| 175 | U78718 | Dugesia tigrina 26S ribosomal RNA gene, partial sequence | 3.6 | |
| 176 | D16471 | Human mRNA, Xq terminal portion | 3.6 | |
| 177 | X69838 | H. sapiens mRNA for G9a | 3.6 | |
| 178 | M24685 | Human angiotensinogen (AGT) gene, exon 1 | 3.6 | |
| 179 | L05468 | Trichomonas vaginalis beta-tubulin (btub 1) gene, complete | 3.6 | |
| 180 | Y08926 | P. falciparum mRNA for AARP1 protein, partial | 3.6 | |
| 181 | M59743 | Rabbit cardiac muscle Ca-2+ release channel | 3.6 | |
| 182 | X51952 | Human UCP gene for uncoupling protein exons 1 and 2 | 3.6 | |
| 183 | U25180 | Candida albicans phosphoglycerate kinase (PGK1) gene, | 3.6 | |
| | | complete cds. | | |
| 184 | X58080 | Maize chioroplast ORF170 and psaA gene | 3.6 | |
| 185 | Z24609 | H. sapiens (D15502) DNA segment containing (CA) repeat; | 3.6 | |
| | | clone AFM361td9; single read | | |
| 186 | M24936 | Mus musculus (BALB/c) L1 repeat insertion in the kappa | 3.6 | |
| | | chain 5′ flank. | | |
| 187 | U50951 | Thermoanaerobacterium thermosulfurigenes orfA gene, | 3.6 | |
| | | partial cds, polygalacturonase precursor (pg1A), abcA, abcB | | |
| | | and sigma factor (sigA) genes, complete cds | | |
| 188 | U57999 | Mus musculus prosaposin (psap/SGP-1) gene, complete cds. | 3.6 | |
| 189 | AF000949 | Canis familiaris keratin (KRT9) gene, complete cds | 3.6 | |
| 190 | S54325 | nucleoprotein [tomato chlorotic spot virus, isolate BR-03, | 3.6 | |
| | | Genomic RNA, 292 nt] | | |
| 191 | S70572 | {endogenous retrovirus SY-3, provirus}[human, | 3.6 | |
| | | lymphocytes, Genomic, 2189 nt] | | |
| 192 | AE000092 | Rhizobium sp. NGR234 plasmid pNGR234a, section 29 of | 3.6 | |
| | | 46 of the complete plasmid sequence | | |
| 193 | U75285 | Homo sapiens apoptosis inhibitor survivin gene, | 3.6 | |
| 194 | X91404 | W. mirabilis mRNA for phosphoenolpyruvate carboxylase | 3.6 | |
| 195 | M17376 | Mouse alpha-1-acid glycoprotein I (AGP-1) gene, complete | 3.6 | |
| 196 | Z73360 | Human DNA sequence from cosmid 92M18, BRCA2 gene | 3.6 | |
| | | region chromosome 13q12-13 | | |
| 197 | L05364 | Arabidopsis thaliana polyubiquitin (ubq7) gene sequence. | 3.6 | |
| 198 | J04353 | Human papillomavirus type 31 (HPV-31) complete genome. | 3.6 | |
| 199 | X03882 | Paramecium primaurelia gene for G surface protein | 3.6 | |
| 200 | U53152 | Caenorhabditis elegans cosmid K11D5. | 3.6 | |
| 201 | M65126 | Human snRNP E protein pseudogene EB. | 3.6 | |
| 202 | J04186 | Yeast (S. cerevisiae) lysyl-tRNA synthetase (KRS1) alpha-2 | 3.6 | |
| | | subunit gene, complete cds. | | |
| 203 | L35281 | Mus musculus (clone MKT6) morphogenetic protein 1 | 3.6 | |
| | | (BMP-1/His), alternative splice | | |
| 204 | D83390 | Gallus gallus mRNA for connectin/titin, partial cds | 3.6 | |
| 205 | U22103 | Glycine max partial SIRE-1 sequence gag-protease | 3.6 | |
| | | polyprotein mRNA, complete cds | | |
| 206 | U82705 | Human interferon alpha2 upstream scaffold associated | 3.6 | |
| | | region 3 (SAR3) and non-SAR region DNA | | |
| 207 | U39389 | Rhagolefis cerasi 16S ribosomal RNA gene, mitochondrial | 3.5 | |
| | | gene encoding mitochondrial RNA, partial sequence | | |
| 208 | X13287 | Medicago sativa nodulin-25 gene | 3.5 | |
| 209 | X91337 | H. sapiens La/SS-B pseudogene 2 | 3.5 | |
| 210 | M19684 | Human alpha-1-antitrypsin-related protein gene, exons 3, 4 | 3.5 | |
| 211 | M35296 | Human tyrosine kinase arg gene mRNA. | 3.5 | |
| 212 | X88000 | S. tenacellus mRNA for ubiquinol:cytochrome c | 3.5 | |
| 213 | M61906 | Human P13-kinase associated p85 mRNA sequence. | 3.5 | |
| 214 | Z29084 | C. butyricum transposon containing tbcC gene | 3.5 | |
| 215 | M92039 | Gallus gallus violet sensitive cone opsin mRNA, complete | 3.5 | |
| 216 | D86478 | Schizosaccharornyces pombe DNA for Crb2, complete cds | 3.5 | |
| 217 | U35737 | Saccharomyces cerevisiae nuclear polyadenylated RNA- | 3.5 | |
| | | protein (NAB4) gene, complete cds. | | |
| 218 | M22860 | B. thuringiensis 20 and 67 kd mosquitocidal protein genes, | 3.5 | |
| | | complete cds and IS231-like transposase, 3′ end. | | |
| 219 | Z57857 | H. sapiens CpG island DNA genomic Mse1 fragment, clone | 3.5 | |
| | | 1d10, forward read cpg1d10.fla | | |
| 220 | U07059 | Pneumocystis carinii clone PC14103 major surface | 3.5 | |
| | | glycoprotein mRNA, complete cds. | | |
| 221 | X52978 | H. sapiens gene for lipoprotein lipase | 3.5 | |
| 222 | M24566 | Dictyostelium discoideum tRNA-Glu-GAA gene, clone | 3.5 | |
| 223 | U11058 | Homo sapiens calcium dependent potassium channel alpha | 3.5 | |
| | | subunit (MaxiK) mRNA, complete cds | | |
| 224 | M21514 | Rinderpest virus fusion rotein mRNA, complete cds. | 3.5 | |
| 225 | X80454 | HIV type 1 (CA7) env-gene | 3.5 | |
| 226 | X98695 | Bacteriophage T4 modA and modB genes | 3.5 | |
| 227 | X76186 | Rinderpest virus (RBOK vaccine) mRNA for protein | 3.5 | |
| 228 | S82456 | PGHS-2 = prostaglandin endoperoxide H synthase-2 | 3.5 | |
| 229 | D85194 | Arabidopsis thaliana mRNA, partial cds | 3.5 | |
| 230 | L35661 | Homo sapiens (subclone H8 4_b9 from P1 35 H5 C8) DNA | 3.5 | |
| 231 | L76205 | Colletotrichum gloeosporioides non-LTR retrotransposon | 3.5 | |
| 232 | NM_000464.1 | Homo sapiens xeroderma pigmentosum, complementation | 3.5 | |
| | | group F (XPF) mRNA > ::gb\|U64315\|HSU64315 Human | | |
| | | DNA repair endonuclease subunit | | |
| 233 | X02155 | Bovine mRNA fragment for thyroglobulin N-terminal region | 3.5 | |
| 234 | D16437 | Synechococcus sp. DNA for PacS, complete cds | 3.5 | |
| 235 | X97570 | Z. mays dek34 gene | 3.5 | |
| 236 | S65225 | PEP-19 = neuron-specific [mice, Genomic, 1358 nt, segment | 3.5 | |
| 237 | U33099 | Human immunodeficiency virus type 1 isolate GM4, | 3.5 | |
| | | envelope glycoprotein (env) gene, V1-V5 region, partial cds | | |
| 238 | X71604 | H. sapiens son-pseudogene | 3.5 | |
| 239 | L47357 | Homo sapiens TIMP1 gene, exon 1. | 3.5 | |
| 240 | AF015490 | Bos taurus immunoglobulin variable region mRNA, partial | 3.4 | |
| | | cds > :: gb\|AF015492\|AF015492 Bos taurus | | |
| | | immunoglobulin variable region mRNA, partial cds | | |
| 241 | U93308 | Arabidopsis thaliana decoy (DECOY) gene, complete cds | 3.4 | |
| | | and valyl tRNA synthetase (valRS) gene, partial cds | | |
| 242 | Y12576 | Arabidopsis thaliana mRNA for histone H2B | 3.4 | |
| 243 | X07977 | Aspergillus amstelodami mtDNA with ARS element | 3.4 | |
| 244 | X70276 | Yeast centromere-containing shuttle vector YCp50 | 3.4 | |
| 245 | J03268 | Yeast (S. cerevisiae) polymerase I gene, complete cds. | 3.4 | |
| 246 | AF013168 | Homo sapiens hamartin (TSC1) mRNA, complete cds | 3.4 | |
| 247 | M32476 | Rat carcinoembryonic antigen-related protein | 3.4 | |
| 248 | X83390 | Albinaria coerulea complete mithochondria DNA | 3.4 | |
| 249 | U63337 | Mus musculus cyclin-dependent kinase-2 alpha | 3.4 | |
| 250 | D85530 | Human CpG island sequence, clone G0310 | 3.4 | |
| 251 | M92423 | Human FK506-binding protein 12 (FKBP12) mRNA, exons | 3.4 | |
| | | 3 and 4, complete FKBP12A mRNA and complete cds. | | |
| 252 | AB002693 | Mouse mRNA for ISBT, complete cds | 3.4 | |
| 253 | L01057 | Human (clone TRI-6) satellite I repeat region. | 3.4 | |
| 254 | U11270 | Human antithrombin III gene, exon 1 and partial cds. | 3.4 | |
| 255 | AB000280 | Rattus norvegicus mRNA for peptide/histidine transporter, | 3.4 | |
| | | complete cds | | |
| 256 | J03886 | Rat skeletal muscle myosin light chain kinase, complete cds. | 3.4 | |
| 257 | M16809 | Yeast (S. cerevisiae) CLS4 gene encoding a Ca regulatory | 3.4 | |
| | | protein, complete cds. | | |
| 258 | X58286 | Drosophila genes z600, gdl, Eip28/29 and mex1 | 3.4 | |
| 259 | X07267 | Rat gene 33 5′-region | 3.4 | |
| 260 | Z68129 | H. sapiens IDH gamma gene and TRAP delta gene | 3.4 | |
| 261 | X87241 | H. sapiens mRNA for hFat protein | 3.4 | |
| 262 | Z93650 | O. bellus 28S rRNA gene, D2 variable region | 3.4 | |
| 263 | D87471 | Mus musculus mRNA for gsg3, complete cds | 3.4 | |
| 264 | L34193 | Ipomopsis aggregata chloroplast maturase | 3.4 | |
| 265 | AF012899 | Sambucus nigra ribosome inactivating protein precursor | 3.4 | |
| | | mRNA, complete cds | | |
| 266 | X17318 | Zea mays chioroplast trnC gene, rpoB gene, rpoC1 gene, | 3.4 | |
| | | rpoC2 gene and rps2 gene for transfer RNA-Cys, RNA | | |
| | | polymerase subunits beta, beta-1, beta-2 and ribosomal | | |
| 267 | L35661 | Homo sapiens (subclone H8 4_b9 from P1 35 H5 C8) DNA | 3.4 | |
| 268 | U25236 | Human immunodeficiency virus type 1 clone XSH159D1D | 3.4 | |
| | | envelope glycoprotein (env) pseudogene, v1-v5 region, | | |
| 269 | L81392 | Homo sapiens (subclone 1_c12 from P1 H39) DNA | 3.4 | |
| 270 | M60172 | G. domesticus novel collagen protein mRNA, 3′ end. | 3.4 | |
| 271 | M15263 | E. coli araBAD operon encoding L-ribulokinase, L-arabinose | 3.4 | |
| | | isomerase, and L-ribulose 5-phosphate 4-epimerase. | | |
| 272 | S53273 | OMP = olfactory marker protein {promoter} [mice, Genomic, | 3.4 | |
| 273 | U22056 | Mus musculus fertilin alpha precursor (ADAM 1) mRNA, | 3.3 | |
| 274 | X63382 | Antithamnion sp. rhodoplast genes atpI, atpH, atpG, atpF, | 3.3 | |
| | | atpD, atpA, orf1, orf2 and orf3 | | |
| 275 | U67462 | Methanococcus jannaschii section 4 of 150 of the complete | 3.3 | |
| 276 | M24566 | Dictyostelium discoideum tRiNA-Glu-GAA gene, clone | 3.3 | |
| 277 | L13609 | Human catalase (CAT) gene, exon 1, 5′ end. | | |
| 278 | Z11486 | Pinus strobus L. mRNA for pine globulin-1 | 3.3 | |
| 279 | X03366 | Bovine spleen trypsin inhibitor II (SI) gene | 3.3 | |
| 280 | D49558 | Human DNA for gastric inhibitory polypeptide receptor, | 3.3 | |
| | | exon 5, 6, 7, 8, 9, 10, 11 and 12 | | |
| 281 | U52110 | Sulfolobus solfataricus putative ribokinase and Dbh genes, | 3.3 | |
| | | complete cds, and putative ATPase gene, partial cds | | |
| 282 | M34663 | Human chaperonin (HSP60) non-functional pseudogene 4. | 3.3 | |
| 283 | X82303 | P. groenlandica mitochondrial cytochrome b gene | 3.3 | |
| 284 | D78174 | Mouse cerebellum mRNA for Zic4 protein, complete cds | 3.3 | |
| 285 | D86966 | Human mRNA for KIAA0211 gene, complete cds | 3.3 | |
| 286 | L13198 | Clortridium perfringens type B beta-toxin gene, complete | 3.3 | |
| 287 | J05516 | E. coli leucine-specific transport (LS-BP; LIV-BP) system | 3.3 | |
| | | (livHMGF) genes, complete cds. | | |
| 288 | M58318 | Homo sapiens ala gene. | 3.3 | |
| 289 | X57297 | A. majus TAM1 gene for TNP1 and TNP2 | 3.3 | |
| 290 | U33099 | Human immunodeficiency virus type 1 isolate GM4, | 3.3 | |
| | | envelope glycoprotein (env) gene, V1-V5 region, partial cds | | |
| 291 | D29809 | Coptis japonica mRNA for S-adenosyl-L- | 3.3 | |
| | | methionine:scoulerine 9-O-methyltransferase, complete cds | | |
| 292 | M12727 | Human T-cell surface antigen T3 delta-chain gene, exons | 3.3 | |
| | | 2, 3, 4 and 5, clone pKR-1. | | |
| 293 | X54601 | Human MFD72 dinucleotide repeat DNA >:: | 3.2 | |
| | | gb\|I31132\|I31132 Sequence 44 from U.S. Pat. No. 5582979 | 3.2 | |
| 294 | Y11740 | H. sapiens whn gene, exon 1a and 1b | 3.2 | |
| 295 | M24566 | Dictyostelium discoideum tRNA-Glu-GAA gene, clone | 3.2 | |
| 296 | S83358 | focal adhesion kinase/pp125FAK/FAK + {altematively | 3.2 | |
| | | spliced} [rats, striatum, mRNA, 4575 nt] | | |
| 297 | M68519 | Human pulmonary surfactant-associated protein SP-A | 3.2 | |
| | | (SFTP1) gene, complete cds. | | |
| 298 | U22056 | Mus musculus fertilin alpha precursor (ADAM 1) mRNA, | 3.2 | |
| 299 | AB005803.1 | Homo sapiens DNA for histidine-rich glycoprotein, | 3.2 | |
| 300 | M24566 | Dictyostelium discoideum tRNA-Glu-GAA gene, clone | 3.2 | |
| 301 | X66139 | M. fascicularis mRNA for epididymal apical protein I | 3.2 | |
| 302 | U16955 | Plasmodium falciparum ATPase 2 gene, complete cds. | 3.2 | |
| 303 | M87108 | Human immunodeficiency virus type 2 (FOPOLC4) | 3.2 | |
| | | polymerase fragment. | | |
| 304 | U67585 | Methanococcus jannaschii section 127 of 150 of the | 3.2 | |
| 305 | U70559 | Saccharomyces cerevisiae DNA repair/transcription protein | 3.2 | |
| | | Mms19p (MMS19) gene, complete cds | | |
| 306 | D88191 | Chlorella Virus vChta-1 gene, complete cds | 3.2 | |
| 307 | M32352 | Mouse renin (Ren-1-d) gene, complete cds. | 3.2 | |
| 308 | X64406 | Marburg Virus RNA for ORF-2 and ORF-3 | 3.2 | |
| 309 | NM_002763.1 | Homo sapiens prospero-related homeobox 1 protein (Prox 1) | 3.2 | |
| | | mRNA, complete cds | | |
| 310 | Y11681 | Homo sapiens for mitochondrial ribosomal protein | 3.2 | |
| 311 | S80986 | svp[40]= svp-related nuclear receptor/retinoid signaling | 3.2 | |
| | | modulator [zebrafishes, mRNA, 3876 nt] | | |
| 312 | Z18630 | R. norvegicus mRNA for J1-160/180 neural recognition | 3.2 | |
| 313 | AF012899 | Sambucus nigra ribosome inactivating protein precursor | 3.2 | |
| | | mRNA, complete cds | | |
| 314 | X14336 | Filamentous Bacteriophage I2-2 genome | 3.1 | |
| 315 | U58884 | Mus musculus SH3-containing protein SH3P7 mRNA, | 3.1 | |
| | | complete cds. similar to Human Drebrin | | |
| 316 | X66139 | M. fascicularis mRNA for epididymal apical protein I | 3.1 | |
| 317 | D90819 | E. coli genomic DNA, Kohara clone #328(39.4-39.8 min.) | 3.1 | |
| 318 | U78770 | Mus musculus spasmolytic polypeptide (mSP) gene, | 3.1 | |
| 319 | U06083 | Human N-acetylgalactosamine 6-sulphatase | 3.1 | |
| 320 | U48228 | Plasmodium falciparum ribosomal RNA gene, partial | 3 | |
| | | sequence, internal transcribed spacer 2, and large subunit | | |
| | | ribosomal RNA gene, complete sequence | | |
| 321 | X95188 | R. norvegicus mRNA for Pristanoyl:CoA Oxidase | 3 | |
| 322 | Z34932 | S. scrofa mRNA for protein phosphatase 2A 55 kDaf | 3 | |
| | | regulatory subunit, alpha isoform (partial) | | |
| 323 | U40837 | Ovine adenovirus terminal protein gene, partial cds, 52/55 K | 3 | |
| | | pIIIa, III, pVII, pX, pVI, II, endopeptidase and DNA | | |
| | | binding protein genes, complete cds, and 100 K hexon | | |
| 324 | X77233 | L. esculentum (de Ruiter 83G38) Adb2 gene | 2.9 | |
| 325 | M81341 | Plasmodium falciparum cysteine proteinase gene, complete | 2.8 | |
| 326 | X99832 | H. sapiens CLN3 gene, complete CDS | 2.7 | |
| 327 | M64703 | N. crassa valyl-tRNA synthetase (cyt-20/un-3) gene. | 2.1 | |
| 328 | AB001635.1 | Homo sapiens DNA for cGMP-binding cGMP-specific | 1.9 | |
| | | phosphodiesterase (PDE5), exon 21 and complete cds | | |
| 329 | X12669 | H. sapiens gene for arginase exon 8 and 3′-flanking region | 1.8 | |
| 330 | M19238 | Yeast (S. cerevisiae) ribosomal protein L44′ gene, complete | 1.8 | |
| 331 | AE001665 | Chlamydia pneumoniae section 81 of 103 of the complete | 1.8 | |
| 332 | X15603 | Human elastin gene, exon 1 | 1.8 | |
| 333 | AE000553.1 | Helicobacter pylori 26695 section 31 of 134 of the complete | 1.8 | |
| 334 | AB022333 | obligately oligotrophic bacteria POC-111 DNA for 16S | 1.8 | |
| | | rRNA, partial sequence | | |
| 335 | X51666 | S. cerevisiae DNA for SEC62 gene | 1.8 | |
| 336 | X16588 | B. nigra repeat DNA (clone pBN 35) | 1.8 | |
| 337 | U19253 | Xenopus laevis/gilli complement component C3 mRNA, | 1.8 | |
| 338 | U32770 | Haemophilus influenzae Rd section 85 of 163 of the | 1.7 | |
| 339 | U64618 | Propithecus verreauxi epsilon globin gene, 5′flanking region | 1.7 | |
| | | and exons 1-3, complete cds | | |
| 340 | U39700 | Mycoplasma genitalium section 22 of 51 of the complete | 1.7 | |
| 341 | Z82656 | R. prowazekii genomic DNA fragment (clone A45F) | 1.7 | |
| 342 | AL049337.1 | Homo sapiens mRNA; cDNA DKFZp564P016 (from clone | 1.7 | |
| | | DKFZp564P016) | | |
| 343 | Z60848 | H. sapiens CpG island DNA genomic Mse1 fragment, clone | 1.7 | |
| | | 36g10, forward read cpg36g10.ft1a | | |
| 344 | Z28054 | S. cerevisiae chromosome XI reading frame ORF YKL054c | 1.7 | |
| 345 | S79213 | phosphatase inhibitor-2 = cytosolic regulatory subunit of type | 1.7 | |
| | | 1 protein phosphatase [rats, brain, mRNA, 867 nt] | | |
| 346 | X82265 | C. anuum mRNA for 1-aminocylopropane-1-carboxylate | 1.6 | |
| 347 | U46561 | Tetrahymena thermophila polyubiquitin (TTU3) gene, | 1.5 | |
| | | complete cds, and RNA polyinerase II subunit 2 | | |
| 348 | M12132 | Quail fast skeletal muscle troposin I gene, complete cds. | 1.5 | |
| 349 | X98097 | M. musculus promoter region | 1.4 | |
| 350 | D29963 | Homo sapiens mRNA for CD151, complete cds | 1.4 | |
| 351 | D10471 | Herpes simplex virus type 2 genomic DNA for 0.74-0.84 | 1.4 | |
| | | region, complete cds | | |
| 352 | U34673 | Micoureus demerarae cytochrome b light strand gene, | 1.3 | |
| | | mitochondrial gene encoding niltochondrial protein, | | |
| 353 | M15274 | Human Pro-tRNA and Leu-tRNA genes. | 1.3 | |
| 354 | AJ000486 | Trichomonas vaginalis mgl1 gene | 1.3 | |
| 355 | Z47075 | Caenorhabditis elegans cosmid E02H1, complete sequence | 1.3 | |
| | | [Caenorhabditis elegans] | | |
| 356 | NM_001854.1 | Homo sapiens collagen, type XI, alpha 1 type XI collagen | 1.3 | |
| | | (COL11A1)mRNA, complete cds. | | |
| 357 | U37056 | Clostridium cellulovoran endo-1,4-beta glucanase EngF | 1.3 | |
| | | (engF) gene, complete cds | | |
| 358 | U53328 | Human cyclin G mRNA, complete cds. | 1.3 | |
| 359 | Z48230 | Caenorhabditis elegans cosmid F42G10, complete sequence | 1.3 | |
| | | [Caenorhabditis elegans] | | |
| 360 | L42102 | Homo sapiens (subclone 2_c7 from P1 H25) DNA sequence. | 1.3 | |
| 361 | X89417 | S. cerevisiae DNA for protein phosphatase T gene | 1.3 | |
| 362 | Z79884 | H. sapiens chromosome 22 CpG island DNA genomic Mse1 | 1.3 | |
| | | fragment, clone 303c5, complete read | | |
| 363 | 768129 | H. sapiens IDH gamma gene and TRAP delta gene | 1.3 | |
| 364 | U13800 | Human insulin-like growth factor I (IGF1) gene, intron 4. | 1.3 | |
| 365 | L28995 | Oryza saliva 3-hydroxy-3-methylglutaryl coenzyme A | 1.3 | |
| | | reductase gene, complete cds. | | |
| 366 | L43493 | Saccharomyces cerevisiae Jsn1 gene, complete cds | 1.3 | |
| 367 | X08066 | Caenorhabditis elegans myo-2 gene for myosin heavy chain | 1.3 | |
| | | 2 (MHC-C) | | |
| 368 | U37056 | Clostridium Cellulovorane endo-1,4-beta glucanase EngF | 1.3 | |
| | | (engF) gene, complete cds | | |
| 369 | U19905 | Rickettsia tsutsugamushi TA716 56 kDa type-specific | 1.3 | |
| | | antigen gene, complete cds. | | |
| 370 | U74496 | Human chromosome 4q35 subtelomeric sequence | 1.3 | |
| 371 | U46781 | Pasteurella haemolytica putative coproporphyrinogen III | 1.3 | |
| | | oxidase (hemN′) gene, partial cds, leukotoxin transcriptional | | |
| | | and restriction modification methylase subunit | | |
| 372 | X77300 | S. scrofa genomic DNA microsatellite SO344 | 1.3 | |
| 373 | U53745 | Feline immunodeficiency virus isolate FIV-Pco336-7 pol | 1.3 | |
| | | polyprotein (pol) gene, partial cds | | |
| 374 | L08266 | Mouse Facc mRNA, complete cds. | 1.3 | |
| 375 | X52519 | Human gene for tyrosine aminotransferase (TAT) | 1.3 | |
| 376 | U87543 | Aedes aegypti steroid honnone receptor homolog protein | 1.3 | |
| | | gene, complete cds | | |
| 377 | D16682 | Mycoplasma hyopneumoniae gene for 46 kDa surface | 1.3 | |
| | | antigen, complete cds | | |
| 378 | AF022725 | Hordeum vulgare limit dextrinase (HvLD99) gene, complete | 1.3 | |
| 379 | L18987 | Human alpha-2 type XI collagen mRNA, partial cds. | 1.3 | |
| 380 | Y09400 | S. scrofa mRNA for apical organic cation transporter protein | 1.3 | |
| 381 | U10117 | Human endothelial-monocyte activating polypeptide II | 1.3 | |
| | | mRNA, complete cds. | | |
| 382 | U02618 | Saccharomyces cerevisiae molasses resistance | 1.3 | |
| 383 | Z60848 | H. sapiens CpG island DNA genomic Mse1 fragment, clone | 1.3 | |
| | | 36g10, forward read cpg36g10.ft1a | | |
| 384 | X63203 | H. sapiens gene for pregnancy specific beta-1 glycoprotein > | 1.3 | |
| | | :: gb\|S49771\|S49771 pregnancy-specific beta 1 glycoprotein | | |
| | | {5′ region, promoter} [human,placenta, Genomic, 3036 nt] | | |
| 385 | L31854 | Mus musculus Ig epsilon-chain C gene, exon 4, Mg | 1.3 | |
| 386 | X16588 | B. nigra repeat DNA (clone pBN 35) | 1.3 | |
| 387 | U25342 | Xenopus laevis epithelial sodium channel, gamma subunit | 1.3 | |
| | | (gammaxENaC) mRNA, complete cds. | | |
| 388 | L40806 | Neurospora crassa open reading frame gene, complete cds, | 1.3 | |
| | | met-10+ gene, complete cds | | |
| 389 | S49760 | diacylglycerol kinase [rats, brain, mRNA, 3043 nt] | 1.3 | |
| 390 | L15328 | Saccharomyces cerevisiae RNA helicase gene, complete cds. | 1.3 | |
| 391 | S50809 | protein LG = immunoglobulin binding protein Recombinant | 1.3 | |
| 392 | U14662 | Baboon herpesvirus HVP2 gB glycoprotein (UL27) gene, | 1.3 | |
| | | complete cds. | | |
| 393 | U13173 | Human intestinal H+/peptide cotransporter (Hpept1) gene | 1.3 | |
| | | complete cds | | |
| 394 | W71212 | me33e04.r1 Sores mouse embryo NbME13.5 14.5 Mus | 1.3 | |
| | | musculus cDNA clone 389310 5′ similar to | | |
| | | SW:S105_HUMAN P33763 S100 CALCIUM-BINDING | | |
| | | PROTEIN A5;. > :: emb\|X99921\|MMS100A13 M. musculus | | |
| 395 | U25536 | Petunia hybrida alcohol dehydrogenase-2 (Adh2) gene, | 1.3 | |
| | | promoter, 5′UTR, and partial cds. | | |
| 396 | X75014 | M. musculus Phox2 mRNA for homeodomain protein | 1.3 | |
| 397 | Z49436 | S. cerevisiae chromosome X reading frame ORF YJL161w | 1.3 | |
| 398 | X12780 | Chicken MHC class I (B-F) mRNA F10 | 1.3 | |
| 399 | X04319 | E. coli fhuB gene involved in transport of ferrichrome | 1.3 | |
| 400 | U61297 | Human progesterone receptor (PGR) gene, far 5′flanking | 1.3 | |
| 401 | X99518 | Herpesvirus saimiri virion, transformation-associated region, | 1.3 | |
| | | strain C139 | | |
| 402 | M24001 | Mink enteritis virus antigenic type 2 capsid protein genes | 1.3 | |
| | | VP1 and VP2, complete cds. | | |
| 403 | U44877 | Arabidopsis thaliana geranylgeranyl pyrophosphate synthase | 1.3 | |
| | | (GGPS3) mRNA, partial cds | | |
| 404 | AB003431 | Incilaria fruhstorferi mRNA for Incilarin B, complete cds | 1.3 | |
| 405 | M12792 | Human steroid 21-hydroxylase (P-450(C21)) B gene, | 1.3 | |
| | | complete cds, clone lambda-C21B-1. | | |
| 406 | M28548 | Human mutant 21-hydroxylase B gene, complete cds. | 1.3 | |
| 407 | Y10260 | H. sapiens EYA1A gene | 1.3 | |
| 408 | U41740 | Human trans-Golgi p230 mRNA, complete cds | 1.3 | |
| 409 | X02295 | Paramecium 5′ region of gene for surface protein 51A | 1.3 | |
| 410 | S45791 | band 3-related protein = renal anion exchanger AE2 homolog | 1.3 | |
| | | [rabbits, New Zealand White, ileal epithelial cells, mRNA, | | |
| 411 | AE000625. | Helicobacter pylori 26695 section 103 of 134 of the | 1.3 | |
| 412 | X16028 | R. norvegicus gene encoding alkaline phosphatase, exon 3 | 1.3 | |
| | | and joined CDS | | |
| 413 | M73461 | Saccharomyces cerevisiae FL100 RNA14 gene, complete | 1.3 | |
| 414 | L08845 | Drosophila melanogaster disabled mRNA,complete cds | 1.3 | |
| 415 | AE000635.1 | Helicobacter pylori 26695 section 113 of 134 of the | 1.2 | |
| 416 | L39962 | Medicago sativa middle repetitive DNA | 1.2 | |
| 417 | U55371 | Caenorhabditis elegans cosmid T19F4. | 1.2 | |
| 418 | X13679 | Oryza sativa H3 histone pseudogene H3R-12 | 1.2 | |
| 419 | J00223 | Homo sapiens epsilon-1 pseudogene (IGHEP1) gene, CH3 | 1.2 | |
| | | and CH4 regions, exons 3 and 4 and partial sequence | | |
| 420 | AE000649.1 | Helicobacter pylori 26695 section 127 of 134 of the | 1.2 | |
| 421 | X52256 | A. thaliana tufA gene for elongation factor Tu | 1.2 | |
| 422 | M81388 | Chilo iridescent virus DNA-directed RNA polymerase and | 1.2 | |
| | | helicase genes, complete cds's. > :: gb\|S75674\|S75674 DNA | | |
| | | helicase homolog, DNA-depenent RNA polymerase largest | | |
| | | subunit homolog {fragment M} [Chilo iridescent virus CIV, | | |
| 423 | S57565 | histamine H2-receptor [rats, Genomic, 1928 nt] | 1.2 | |
| 424 | X84347 | H. sapiens mRNA for sperm adhesion molecule hPH-20 | 1.2 | |
| 425 | X53579 | A Ahaliana agamous (AG) gene | 1.2 | |
| 426 | Y09539 | L. japonicus gene encoding RING finger protein | 1.2 | |
| 427 | L05500 | Human fetal brain adenylyl cyclase mRNA, 3′ end. | 1.2 | |
| 428 | X68019 | Feline Immunodeficiency Virus GAG gene | 1.2 | |
| 429 | L76739 | Human immunodeficiency virus type 2 (HIV-2 ARM) | 1.2 | |
| | | proviral surface glycoprotein (gp125) gene, partial cds Type | | |
| | | 2 partial envelope sequence, isolate arm from mother in | | |
| 430 | L38769 | Pisolithus tinctorius (F00035) mRNA, EST0049. | 1.2 | |
| 431 | L39786 | Lupinus angustifolius conglutin gamma gene, complete cds | 1.2 | |
| 432 | D10510 | Homo sapiens MAT gene for mitochondrial acetoacetyl- | 1.2 | |
| | | CoA thiolase, exon 11 | | |
| 433 | U47687 | Streptococcus pneumoniae immunoglobulin A1 protease | 1.2 | |
| | | (iga) gene, complete cds | | |
| 434 | U63922 | Xenopus laevis beta-transducin repeat containing protein-3 | 1.2 | |
| | | mRNA, partial cds | | |
| 435 | Z27234 | S. tuberosum STACS2 gene for 1-Aminocyclopropane-1- | 1.2 | |
| | | carboxylate synthase | | |
| 436 | X65365.1 | R. norvegicus GHF1 gene, exon 2B and alternative spliced | 1.2 | |
| 437 | X04336 | Podospora anserina race A mitochondrial DNA class II | 1.2 | |
| | | intron downstream of alpha-sen DNA near CoI gene 5′end | | |
| 438 | X12864 | Yeast (S. douglassi) NAM2 gene for mitochondrial leucyl- | 1.2 | |
| | | tRNA synthetase (EC 6.1.1.4) | | |
| 439 | U66032 | Methanosarcina thermophila CO dehydrogenase/acetyl-CoA | 1.2 | |
| | | synthase alpha subunit (cdhA), epsiolon subunit (cdhB), beta | | |
| | | subunit (cdhC), and NifH class IV protein homolog genes, | | |
| | | complete cds, CO dehydrogenase/acetyl-CoA synthas . . . | | |
| 440 | L08266 | Mouse Facc mRNA, complete cds. | 1.2 | |
| 441 | M64085 | Mouse spi2 proteinase inhibitor (spi2/eb1) mRNA, 3′ end. | 1.2 | |
| 442 | X12773 | Strongylocentrotus purpuratus Spec2d gene 5′-flank and | 1.2 | |
| 443 | U13988 | Peanut chlorotic streak caulimovirus, complete genome. | 1.2 | |
| 444 | U23180 | Caenorhabditis elegans cosmid C28F5 | 1.2 | |
| 445 | M20537 | Mouse thyrotropin beta-subunit gene, exon 5. | 1.2 | |
| 446 | U25881 | Agrius cingulata NADH dehydrogenase subunit 1 protein, | 1.2 | |
| 447 | Y08581 | F. rubripes hsp70-4 gene, complete | 1.2 | |
| 448 | L31848 | Homo sapiens serine/threonine kinase receptor 2 | 1.2 | |
| 449 | M15840 | Human interleukin 1-beta (IL1B) gene, complete cds. | 1.2 | |
| 450 | Z23977 | H. sapiens (D6S443) DNA segment containing (CA) repeat; | 1.2 | |
| | | clone AFM277wb5; single read | | |
| 451 | X14592 | P. hybrida chsB gene for chalcone synthase | 1.2 | |
| 452 | Z49900 | P. sativum mRNA for small GTP-binding protein | 1.2 | |
| 453 | U28154 | Haemophilus somnus cryptic propliage genes, capsid | 1.2 | |
| | | scaffolding protein gene, partial cds, major capsid protein | | |
| | | precursor, endonuclease, capsid completion protein, tail | | |
| | | synthesis proteins, holin, and lysozyme genes, complet . . . | | |
| 454 | D13987 | Brassica napus PE3-PEPCase gene phosphoenolpyruvate | 1.2 | |
| | | carboxylase, complete cds | | |
| 455 | D45243 | Mouse mRNA for ctk, complete cds | 1.2 | |
| 456 | U81144 | Caenorhabditis elegans non-alpha nicotinic acetylcholine | 1.2 | |
| | | receptor subunit precursor (unc-29) gene, complete cds | | |
| 457 | Z92970 | Caenorhabditis elegans cosmid H06O01, complete sequence | 1.2 | |
| | | [Caenorhabditis elegans] | | |
| 458 | L44118 | Homo sapiens proximal CMT1A-REP repeat | 1.2 | |
| 459 | M17120 | D. melanogaster achaete encoding differentiation, | 1.2 | |
| | | complete cds. | | |
| 460 | U55737 | Human ataxia-telangiectasia (ATM) exon42 | 1.2 | |
| 461 | X63525 | P. vulgaris loxA gene for lipoxygenase | 1.2 | |
| 462 | D16402 | Fruitfly Dcdrk gene for Dcdrk kinase, complete cds | 1.2 | |
| 463 | M65287 | Mouse activin receptor (ActR) mRNA, complete cds. | 1.2 | |
| 464 | X13679 | Oryza sativa H3 histonepseudogene H3R-12 | 1.2 | |
| 465 | D28484 | Aspergillus oryzae pgkA gene for phosphoglycerate kinase | 1.2 | |
| | | cds > :: dbj\|E04898\|E04898 gDNA encoding | | |
| 466 | AE000283 | Escherichia coli K-12 MG1655 section 173 of 400 of the | 1.2 | |
| | | complete genome | | |
| 467 | X99832 | H. sapiens CLN3 gene, complete CDS | 1.2 | |
| 468 | U06864 | Rattus norvegicus follistatin-related protein | 1.2 | |
| | | mRNA, complete cds. | | |
| 469 | M87710 | Human simple repeat polymorphism. | 1.2 | |
| 470 | M64497 | Human apolipoprotein AI regulatory protein (ARP-1) | 1.2 | |
| | | mRNA, complete cds. | | |
| 471 | M87710 | Human simple repeat polymorphism. | 1.2 | |
| 472 | X60196 | D. melanogaster partial Mhc gene for myosin heavy chain | 1.2 | |
| 473 | X99719 | S. enterica hsdM, hsdS & hsdR genes | 1.2 | |
| 474 | Z95706 | Microtus rossiaemeridionalis repetitive DNA | 1.2 | |
| 475 | L76372 | Musca domestica (clone F0) arylphorin mRNA fragment | 1.2 | |
| 476 | D26359 | Exogenous mouse mammary tumor virus gene for | 1.2 | |
| | | superantigen, complete cds | | |
| 477 | NM_000694.1 | Homo sapiens aldehyde dehydrogenase 7 (ALDH7) mRNA > | 1.2 | |
| | | :: gb\|U10868\|HSU10868 Human aldehyde dehydrogenase | | |
| | | ALDH7 mRNA, complete cds. | | |
| 478 | AF015882 | Caenorhabditis elegans protein tyrosine phosphatase (ptp-2) | 1.2 | |
| | | mRNA, complete cds | | |
| 479 | M58047 | Mouse 2′,3′-cyclic-nucleotide 3′-phosphodiesterase gene, | 1.2 | |
| 480 | U71121 | Arabidopsis pyruvate decarboxylase-1 (Pdc1) gene, | 1.2 | |
| 481 | U60804 | Danio rerio tumor suppressor p53 (p53) mRNA, complete | 1.2 | |
| 482 | X99254 | P. falciparum gene encoding primase, small subunit | 1.2 | |
| 483 | D10197 | Bovine mRNA for histamine H1 receptor, complete cds | 1.2 | |
| 484 | Y09764 | Homo sapiens GABRE gene, exon 2-8 | 1.2 | |
| 485 | U72396 | Lycopersicon esculentum class II small heat shock protein | 1.2 | |
| | | Le-HSP17.6 mRNA, complete cds | | |
| 486 | X72950 | X. laevis H31 gene for histone H3 | 1.2 | |
| 487 | D29956 | Human mRNA for KIAA0055 gene, complete cds | 1.2 | |
| 488 | X56003 | E. coli (plasmidpFM205) faeE and faeF genes | 1.2 | |
| 489 | M64269 | Human mast cell chymase gene, complete cds. | 1.2 | |
| 490 | AB002963 | Human immunodeficiency virus type 1 env gene for | 1.2 | |
| | | envelope glycoprotein, partial cds, clone 205E5B2t | | |
| 491 | X90846 | H. sapiens mRNA for mixed lineage kinase 2 | 1.2 | |
| 492 | X03715 | Spiroplasma melliferum tRNA gene cluster | 1.2 | |
| 493 | U83494 | Tropidurus hispidus ATPase subunit 6 (ATPase6) gene, | 1.2 | |
| | | mitochondrial gene encoding mitochondrial protein, partial | | |
| 494 | U60804 | Danio rerio tumor suppressor p53 (Ps3) mRNA complete | 1.2 | |
| 495 | M24081 | Tetrahymena pyriformis (clone pTU2) ubiquitin genes, 3′and | 1.2 | |
| 496 | U54803 | Mus musculus cysteine protease (Lice) gene, exons 3-7, and | 1.2 | |
| | | complete cds | | |
| 497 | L13748 | Human dihydrolipoamide dehydrogenase gene, exon 1. | 1.2 | |
| 498 | U29390 | Chrysosporium parvum 18S ribosomal RNA gene, partial | 1.2 | |
| 499 | L81694 | Homo sapiens (subclone 1_d1 from P1 H56) DNA sequence | 1.2 | |
| 500 | X65366.1 | R. norvegicus GHF1 gene, intron 2 | 1.2 | |
| 501 | U74651 | Human DNA polymerase gamma (polg) gene, promoter | 1.2 | |
| | | region and partial cds | | |
| 502 | X65591 | S. mansoni mRNA for myosin II heavy chain | 1.2 | |
| 503 | D17255 | Human HepG2 3′ region MboI cDNA, clone hmdsc12m3 | 1.2 | |
| 504 | L33792 | Senecio odorus lipid transfer protein mRNA, 3′ end. | 1.2 | |
| 505 | L13612 | Drosophila melanogaster dead-box protein (dbp45A) gene, | 1.2 | |
| | | complete cds. > :: emb\|Z23266\|DMDEADBXA | | |
| | | D. melanogaster DEAD-box gene, complete CDS | | |
| 506 | X81650 | M. musculus for c-ros protooncogene | 1.2 | |
| 507 | NM_000037.1 | Homo sapiens ankyrin 1, erythrocytic (ANK1) mRNA > :: | 1.2 | |
| | | gb\|M28880\|HUMANK Human erythroid ankyrin mRNA, | | |
| 508 | X98543 | A. thaliana endo-1,4-beta-glucanase gene | 1.2 | |
| 509 | D89501 | Human PBI gene, complete cds | 1.2 | |
| 510 | Z82174 | Human DNA sequence from cosmid B20F6 on chromosome | 1.2 | |
| | | 22, complete sequence [Homo sapiens] | | |
| 511 | M36881 | Human lymphocyte-specific protein tyrosine kinase | 1.2 | |
| 512 | U92014 | Human clone 121711 defecfive mariner transposon Hsmar2 | 1.2 | |
| | | mRNA sequence | | |
| 513 | U09948 | Morone saxatilis Hox-B5-like homeodomain protein gene, | 1.2 | |
| 514 | M58155 | African swine fever virus multigene families 360 and 110. | 1.2 | |
| 515 | U30500 | Sicilian sandfly fever virus glycoprotein precursor | 1.2 | |
| | | polypeptide mRNA, complete cds. | | |
| 516 | L09190 | Human trichohyalin (TRHY) gene, complete cds. | 1.2 | |
| 517 | U67508 | Methanococcus jannaschii section 50 of 150 of the complete | 1.2 | |
| 518 | M81186 | Clostridium botulinum neurotoxin type B (botB) gene | 1.2 | |
| 519 | U93037 | Homo sapiens elastin gene, exons 5-27 and alternatively | 1.2 | |
| | | spliced products, partial cds | | |
| 520 | D87454 | Human mRNA for KIAA0265 gene, partial cds | 1.2 | |
| 521 | D87558 | Gallus gallus mRNA for C-Serrate-2, partial cds | 1.2 | |
| 522 | Z32847 | L. infantum (10541) kmetoplast DNA | 1.2 | |
| 523 | U09584 | Human PL6 protein (PL6) mRNA, complete cds. | 1.2 | |
| 524 | AC001530 | Homo sapiens (subclone 2_b8 from P1 H56) DNA sequence | 1.2 | |
| 525 | X74322 | H. sapiens gap-I gene | 1.2 | |
| 526 | D29792 | Mouse gene for T cell receptor gamna chain | 1.2 | |
| 527 | M24001 | Mink enteritis virus antigenic type 2 capsid protein genes | 1.2 | |
| | | VP1 and VP2, complete cds. | | |
| 528 | K02819 | Rabbit MHC RLA region class I 19-1 gene, complete cds. | 1.2 | |
| 529 | L33879 | Insertion sequence IS1245 (from Mycobacterium avium) | 1.2 | |
| | | transposase gene, complete cds. | | |
| 530 | AE000607.1 | Helicobacter pylori 26695 section 85 of 134 of the complete | 1.2 | |
| 531 | W71212 | me33e04.r1 Soares embryo NbME13.5 14.5 Mus | 1.2 | |
| | | musculus cDNA clone 389310 5′ similar to | | |
| | | SW:S105_HUMAN P33763 S100 CALCIUM-BINDING | | |
| | | PROTEIN A5;. > :: emb\|X99921\|MMS100A13 M. musculus | | |
| 532 | X83078 | M. musculus nid gene (exon 4) | 1.2 | |
| 533 | U95041 | Rattus norvegicus transcriptional corepressor KAP1/TIF1B | 1.2 | |
| | | mRNA, partial cds | | |
| 534 | X58907 | H. sapiens CYP21 gene for steroid 21-monooxygenas | 1.2 | |
| 535 | L11669 | Human tetracycline transporter-like protein mRNA, | 1.2 | |
| 536 | L37053 | Gorilla gorilla (clone Gor-ID) Rhesus-like protein mRNA, | 1.2 | |
| 537 | M33782 | Human TFEB protein mRNA, partial cds. | 1.2 | |
| 538 | D78172 | Spinacia oleracea mRNA for 26S proteasome beta subunit, | 1.2 | |
| | | complete cds | | |
| 539 | M33782 | Human TFEB protein mRNA, partial cds. | 1.2 | |
| 540 | M33782 | Human TFEB protein mRNA, partial cds. | 1.2 | |
| 541 | Z54312 | L. sake las ]A, M, P, T] genes | 1.1 | |
| 542 | S81773 | inwardly rectifying K+ channel IRK3(HIT) [hamsters, | 1.1 | |
| | | insulinoma cell line HIT-T15, mRNA Partial, 1791 nt] | | |
| 543 | Z78910 | H. sapiens flow-sorted chromosome 6 HindIII fragment, | 1.1 | |
| 544 | U08408 | Xenopus laevis arginase 3 inRNA, complete cds. | 1.1 | |
| 545 | U26444 | Bacillus subtilis 2,3-dihydro-2,3-dihydroxybenzoate | 1.1 | |
| | | dehydrogenase (dhbA), isochorismate synthase (dhbC), 2,3- | | |
| | | dihydroxybenzoate-AMP ligase (dhbE), and isochorismatase | | |
| | | (dhbB) genes, complete cds, and (dhbF) gene, partial cds | | |
| 546 | X62170 | N. crassa bli-7 gene | 1.1 | |
| 547 | U94403 | Rattus norvegicus proton gated cation channel ASIC1 | 1.1 | |
| | | mRNA, complete cds | | |
| 548 | AJ000498 | Homo sapiens DNA for integration site of HBV in a | 1.1 | |
| | | hepatocellular carcinoma | | |
| 549 | X99485 | L. luteus mRNA for alpha-subunit of G protein | 1.1 | |
| 550 | U67520 | Methanococcus jannaschii section 62 of 150 of the complete | 1.1 | |
| 551 | L25415 | Mycoplasma pulmonis glutamyl tRNA synthetase (gltX) | 1.1 | |
| | | gene restriction-modification enzyme subunits S1A, R1, | | |
| | | M1, S1B (hsds1A, hsdR1, hsdM1, hsds1B) genes, complete | | |
| | | cds's, DNA polymerase III (polC) gene, 3' region. | | |
| 552 | X68107 | M. sativamsCHSII mRNA for chalcone synthase | 1.1 | |
| 553 | X89246 | D. melanogaster mRNA for DHR38 protein | 1.1 | |
| 554 | X64332 | C. lewisii PgiC2-a gene for phosphoglucose isomerase | 1.1 | |
| 555 | U47331 | Rattus norvegicus metabotropic glutamate receptor 4b | 1.1 | |
| | | mRNA, complete cds. | | |
| 556 | X16055 | Bacteriophage T4 gene 20 encoding gp20, structural protein | 1.1 | |
| 557 | D00596 | Homo sapiens gene for thyrmdylate synthase, exons 1, 2, 3, | 1.1 | |
| | | 4, 5, 6, 7, complete cds | | |
| 558 | X14639 | Tomato ribosomal DNA intergenic spacer | 1.1 | |
| 559 | U67520 | Methanococcus jannaschii section 62 of 150 of the complete | 1.1 | |
| 560 | Y11786 | R. prowazekii ksgA gene and 2 open reading frames | 1.1 | |
| 561 | Z81065 | Caenorhabditis elegans cosmid F16C3, complete sequence | 1.1 | |
| | | [Caenorhabditis elegans] | | |
| 562 | X60694 | C. perfringens plasmid epsilon-toxin gene | 1.1 | |
| 563 | X52648 | Schizosaccharomyces pombe p68 gene for p68 protein | 1.1 | |
| 564 | X04078 | Potato patatin pseudogene (SA10C) | 1.1 | |
| 565 | U38783 | Schizosaccharomyces pombe brefeldin A resistance protein | 1.1 | |
| | | (hba1) and unknown orf genes, complete cds | | |
| 566 | U32769 | Haemophilus influenzae Rd section 84 of 163 of the | 1.1 | |
| 567 | D89066 | Staphylococcus aureus DNA for DnaA, complete cds | 1.1 | |
| 568 | U07797 | Rattus norvegicus Sprague-Dawley (T1-alpha) mRNA, | 1.1 | |
| 569 | L14710 | C. elegans cosmid K02D10. | 1.1 | |
| 570 | U42599 | Borrelia burgdorferi plasmid cp18, OspE (ospE) gene, | 1.1 | |
| 571 | U48726 | Human epidermal growth factor receptor (EGFR) precursor- | 1.1 | |
| | | mRNA, exons 8 and 9, partial cds | | |
| 572 | U38844 | Xenopus laevis cyclin-dependent kinase inhibitor p28 gene, | 1.1 | |
| | | complete cds | | |
| 573 | S82864 | Elk-3 = Ets transcription factor [mice, 16-day embryos, | 1.1 | |
| 574 | X65720 | M. musculus gene for protein kinase C-gamma (exon1 and | 1.1 | |
| 575 | D14484 | Hepatitis C virus strain J33 genomic RNA, complete genome | 1.1 | |
| 576 | L11998 | Staphylococcus aureus conjugative transfer gene complex | 1.1 | |
| 577 | D14339 | Rice mitochondrion DNA for ATPase subunit 6 and ORFs, | 1.1 | |
| | | complete cds | | |
| 578 | D38413 | Yeast DNA for Ppf2p, complete cds | 1.1 | |
| 579 | D90210 | Bacteriophage c-st (from C. botulinum) C1-tox gene or | 1.1 | |
| | | botulinum C1 neurotoxin | | |
| 580 | X67838 | B. napus DNA for myrosinase | 1.1 | |
| 581 | X17053 | Rat immediate-early serum-responsive JE gene | 1.1 | |
| 582 | X12426 | Xenopus laevis U1 70K gene exon 4, 5, 6 and 7 | 1.1 | |
| 583 | U55043 | Bacillus subtilis plasmid pPOD2000 Rep, RapAB, RapA, | 1.1 | |
| | | ParA, ParB, and ParC genes, complete cds. | | |
| 584 | M34046 | Human placental protein 14 (PP14) gene, complete cds. | 1.1 | |
| 585 | U52367 | Clostridium acetobutylicum ATCC 824 F-type ATP synthase | 1.1 | |
| | | subunit a (atpA) gene, F-type ATP synthase subunit c (atpC) | | |
| | | gene, and F-type ATP synthase subunit b | | |
| 586 | Z35955 | S. cerevisiae chromosome II reading frame ORF YBRO86c | 1.1 | |
| 587 | U53179 | Caenorhabditis elegans cosmid T27B2. | 1.1 | |
| 588 | X77253 | C. herbarum Cla h III mRNA > ::gb\|I26207\|I26207 | 1.1 | |
| | | Sequence 1 from U.S. Pat. No. 5556953 | | |
| 589 | X72713 | A franciscana mRNA for Sarco/endoplasmic reticulum Ca- | 1.1 | |
| 590 | U29145 | Caenorhabditis elegans (mab-18) mRNA, transcript | 1.1 | |
| 591 | U06061 | Cubanichthys pengelleyi mitochondrial control region | 1.1 | |
| | | partial sequence | | |
| 592 | X62244 | B. mycoides blacI gene for beta-lactamase I | 1.1 | |
| 593 | M88355 | Mouse oxytocin-neurophysin I gene, complete cds | 1.1 | |
| 594 | U83489 | Emericella nidulans septin B (aspB) mRNA, complete cds | 1.1 | |
| 595 | M18193 | Human inter-alpha-tiypsin inhibitor heavy chain mRNA, | 1.1 | |
| | | partial cds, clones lambda-HuHITI-[9, 33]. | | |
| 596 | U71273 | Sus scrofa glucosidase II mRNA, complete cds | 1.1 | |
| 597 | S53497 | immunoglobulin epsilon chain constant region = secreted | 1.1 | |
| | | form {3′ region} [human, B cell myeloma U-266, Genomic, | | |
| 598 | U25119 | Caenorhabditis elegans calcium channel alpha-1 subunit | 1.1 | |
| | | homolog Unc-2 (unc-2) gene, partial cds. | | |
| 599 | U56959 | Caenorhabditis elegans cosmid T21F4. | 1.1 | |
| 600 | X99485 | L. luteus mRNA for alpha-subunit of G protein | 1.1 | |
| 601 | L35848 | Homo sapiens IgE receptor beta chain (HTm4) mRNA, | 1.1 | |
| 602 | U93237 | Human menin (MEN1) gene, complete cds | 1.1 | |
| 603 | L07042 | Medicago sativa MAP kinase MsERK1 mRNA, complete | 1.1 | |
| 604 | Z36977 | N. plumbaginifolia mRNA for catalase (cat3 gene) | 1.1 | |
| 605 | J00738 Rattus norvegicus submaxillary gland alpha-2u globulin | 1.1 | | |
| | | mRNA, complete cds. | | |
| 606 | X03018 | Xenopus laevis histone gene cluster X1H3-A with gene | 1.1 | |
| | | H1A, H2B, H3 and H4 | | |
| 607 | X68449 | L. esculentum U6 snRNA pseudogene (LeU6.1ps) | 1.1 | |
| 608 | U53921 | Pneumocystis carinii major surface glycoprotein | 1.1 | |
| 609 | M87106 | Human immunodeficiency virus type 2 (FOPOLC2) | 1.1 | |
| | | polymerase fragment. > :: gb\|M87107\|HIVPOLC3 Human | | |
| | | immunodeficiency virus type 2 (FOPOLC3) polymerase | | |
| 610 | U84539 | Human dystrobrevin (DTN) gene, exon 11A | 11.1 | |
| 611 | J02896 | S. purpuratus speract egg protein mRNA, complete cds. | 1.1 | |
| 612 | J02896 | S. purpuratus speract egg protein mRNA, complete cds. | 1.1 | |
| 613 | AF016253 | Klebsiella aerogenes D-amino acid dehydrogenase | 1.1 | |
| 614 | L22173 | Saccharomyces cerevisiae aminonitrophenyl propanediol | 1.1 | |
| | | (ANP1), UV excision repair protein (RAD23), cytochrome c | | |
| | | isozyme (CYC7) genes, complete cds. | | |
| 615 | U41357 | Tetrahymena thermophila P-type ATPase (TPA11) gene, | 1.1 | |
| 616 | X14383 | Bunyamwera virus L protein RNA, complete cds | 1.1 | |
| 617 | U50378 | Mus musculus DNA repair enzyme (Ku 70) gene, exon 13 | 1.1 | |
| | | and complete cds | | |
| 618 | Z18278 | Mus musculus of 5HT5 receptor cDNA gene encoding | 1.1 | |
| | | 5HT5 serotonin receptor | | |
| 619 | U14172 | Mus musculus p162 protein mRNA, complete cds. | 1.1 | |
| 620 | X76762 | H. sapiens serotonin transporter gene, exon 14 | 1.1 | |
| 621 | U62055 | Bacillus subtilis CzcD (czcD) gene, partial cds, TrkA (trkA) | 1.1 | |
| | | gene, complete cds | | |
| 622 | X81847 | E. carotovora pel1, pel2 and pel3 genes | 1.1 | |
| 623 | M25477 | Caenorhabditis elegans collagen (col6) gene, complete cds. | 1.1 | |
| 624 | X97196 | D. melanogaster X gene | 1.1 | |
| 625 | L39059 | Homo sapiens transcription factor SL1 mRNA, complete | 1.1 | |
| 626 | M21790 | X. laevis complement component 3 (C3) mRNA, 3′ end. | 1.1 | |
| 627 | X95161 | H. sapiens brca2 gene exon 11 > :: emb\|A62786.1\|A62786 | 1.1 | |
| | | Sequence 27 from Patent WO9719110 | | |
| 628 | K02446 | Chicken smooth-muscle alpha-topomyosin gene, complete | 1.1 | |
| 629 | U24171 | Mus musculus p21 (WAF1) gene, partial promoter sequence | 1.1 | |
| 630 | Z26306 | H. sapiens isoform 1 gene for calcium channel, exons | 1.1 | |
| 631 | U23070 | Human putative transmembrane protein (nma) mRNA, | 1.1 | |
| 632 | AE000046 | Mycoplasma pneumoniae section 46 of 63 of the complete | 1.1 | |
| 633 | X17548 | D. melanogaster singed gene, exon 1 | 1.1 | |
| 634 | U54497 | Xenopus laevis integrin alpha 4 mRNA, complete cds. | 1.1 | |
| 635 | J02793 | Mouse R and L1 (3′ end) repetitive elements. | 1.1 | |
| 636 | D10832 | Equine herpesvirus genomic DNA for ‘TREC’ OCT- | 1.1 | |
| 637 | X51766 | L. polyphyllus mRNA for protein S16 | 1.1 | |
| 638 | U60804 | Danio rerio tumor suppressor p53 (p53) mRNA,complete | 1.1 | |
| 639 | Z79068 | H. sapiens flow-sorted_chromosome 6 HindIII fragment, | 1.1 | |
| 640 | Z73585 | S. cerevisiae chromosome XVI reading frame ORF | 1.1 | |
| 641 | U22818 | Cricetulus griseus SRD-2 mutant sterol regulatory element | 1.1 | |
| | | binding protein-2( SREBP-2) mRNA, complete cds. | | |
| 642 | M25710 | Human thyroid peroxidase (TPO) gene, exon 11. | 1.1 | |
| 643 | L12591 | Human alkaline phosphatase gene, 5′ flanking region. | 1.1 | |
| 644 | L25616 | Homo sapiens kinectin mRNA, complete cds | 1.1 | |
| 645 | U32251 | Bos taurus clone 9 immunoglobulin lambda light chain | 1.1 | |
| | | variable region (Vlambda1b) mRNA, partial cds | 1.1 | |
| 646 | M97516 | Mouse alpha-2 adrenergic receptor gene, complete cds. | 1.1 | |
| 647 | AJ000060 | Mus musculus gene encoding iysosomal hayluronidase, | 1.1 | |
| 648 | L07067 | Simian varicella virus tegument protein gene, complete cds; | | |
| | | serine/threonine protein kinase genes, complete cds; | | |
| | | membrane glycoprotein genes, complete cds's. | | |
| 649 | L00619 | Mouse T-cell-specific tyrosine kinase (Itk) mRNA, complete | 1.1 | |
| 650 | M76981 | Glycine max vspA gene, complete cds. | 1.1 | |
| 651 | D87460 | Human mRNA for KIAA0270 gene, partial cds | 1.1 | |
| 652 | D17466 | Streptomyces setonii crtS gene for sigma factor, complete | 1.1 | |
| 653 | D89066 | Staphylococcus aureus DNA for DnaA, complete cds | 1.1 | |
| 654 | X96853 | P. persica mRNA for endo-beta-1,4-glucanase, pcel1 | 1.1 | |
| 655 | NM_002248.1 | Homo sapiens potassium intermediate/small conductance | 1.1 | |
| | | calcium-activated channel, subfamily N, member 1 | | |
| | | (KCNN1) mRNA > :: gb\|U69883\|HSU69883 Human | | |
| | | calcium-activated potassium channel hSK1 (5K) mRNA, | | |
| 656 | Z63493 | H. sapiens CpG island DNA genomic Mse1 fragment, clone | 1.1 | |
| | | 85c1, reverse read cpg85c1.rt1a | | |
| 657 | M21995 | Human coagulation factor XIII a subunit gene, exon 9. | 1.1 | |
| 658 | X60367 | Mouse CRBPI mRNA for cellular retinol binding protein I | 1.1 | |
| 659 | M63224 | Wheat germin 9f-3.8 gene, complete cds. | 1.1 | |
| 660 | M74515 | Mouse GA binding protein (GABP-alpha subunit) mRNA, | 1.1 | |
| | | complete cds. | | |
| 661 | X52949.1 | G. intestinalis DNA for rRNA tandem repeat unit | 1.1 | |
| 662 | D11388 | Rattus norvegicus gene for ribosomal protein S15, exon | 1.1 | |
| | | 3, 4, complete cds | | |
| 663 | U22302 | Human histo blood group ABO glycosyltransferase | 1.1 | |
| 664 | M38132 | S. pombe rad1 gene, complete cds. | 1 | |
| 665 | U07261 | Perissodus microlepis T51a mitochondrion NADH | 1 | |
| | | dehydrogenase subunit 2 gene, complete cds | | |
| 666 | Z75244 | S. cerevisiae chromosome XV reading frame ORF YOR336w | 1 | |
| 667 | D63816 | Mouse DNA for glutamate trans orter S1c1a3, exon 1 | 1 | |
| 668 | U04699 | Euproctus platycephalus mitochondrion 16S rRNA gene, | 1 | |
| | | partial sequence. | | |
| 669 | M19881 | P. falciparum knop protein (KP) gene, complete cds. | 1 | |
| 670 | X64310 | H. sapiens DNA for pu-py sequence on 11p13 | 1 | |
| 671 | X56469 | Mouse HSA-A gene coding for heat stable antigen | 1 | |
| 672 | L76262 | Meloidogyne hapla mitochondrial COII gene, 3′ end of cds; | 1 | |
| | | transfer RNA-His gene; 16S ribosomal RNA gene; ND3 | | |
| | | complete cds; cytochrome b (cytb) gene, 5′ end of cds. | | |
| 673 | X52574 | Mouse mRNA from Mov10 locus | 1 | |
| 674 | Z11711 | H. sapiens gene for alpha-2 macroglobulin, exon 1 | 1 | |
| 675 | M37240 | P. juncea N8 family repetitive sequence DNA. | 1 | |
| 676 | Z72947 | S. cerevisiae chromosome VII reading frame ORF YGR162w | 1 | |
| 677 | X58713 | N. crassa phr gene for photolyase | 1 | |
| 678 | M30502 | Human immunodeficiency virus type 2 (HIV-2), complete | 1 | |
| | | proviral genome. | | |
| 679 | M23082 | Chicken embryo fibroblast tropomyosin mRNA, complete | 1 | |
| 680 | K03203 | Human PRH1 locus salivary proline-rich protein mRNA | 1 | |
| 681 | M86844 | Microtus chrotorrhinus tandem satellite array DNA sequence | 1 | |
| 682 | U55381 | Leishmania tropica P-glycoprotein E gene, complete cds | 1 | |
| 683 | D11388 | Rattus norvegicus gene for ribosomal protein S15, exon 1, 2, | 1 | |
| | | 3, 4, complete cds | | |
| 684 | L43496 | Xenopus laevis ligase I (ligI) mRNA, complete cds | 1 | |
| 685 | X69103 | C. glutamicum csp2 gene | 0.99 | |
| 686 | M32883 | Alfalfa leghemoglobin gene, complete cds. | 0.98 | |
| 687 | M30502 | Human immunodeficiency virus type 2 (HIV-2), complete | 0.98 | |
| | | proviral genome. | | |
| 688 | K02212 | Human alpha-1-antitrypsin gene (S variant), complete cds. | 0.96 | |
| 689 | Y09746 | H. oligactis mRNA for heat shock protein | 0.96 | |
| 690 | D12580 | Group II phytoplasma gene for 16S ribosomal RNA | 0.95 | |
| 691 | L10465 | Haematobia irritans (clone Horn.fly.3.7) mariner transposase | 0.95 | |
| | | pseudogene, partial cds. | | |
| 692 | U22541 | Enterococcus hirae insertion sequence. | 0.95 | |
| 693 | U66261 | Caenorhabditis elegans multidrug resistance related protein 2 | 0.93 | |
| | | (mrp-2) mRNA, complete cds | | |
| 694 | L05517 | Plasmodium chabaudi DNA sequence, exon 1. | 0.91 | |
| 695 | S40532 | NSCL-2 = basic domain helix-loop-helix gene [mice, embryo, | 0.91 | |
| | | mRNA, 2230 nt] | | |
| 696 | L48339 | Pseudomonas aureofaciens phzFABCD genes, complete | 0.65 | |
| | | cds's. > :: gb\|AR008980\|AR008980 Sequence 11 from patent | | |
| 697 | LX77515 | R. rubrum nifJ gene | 0.65 | |
| 698 | X51394 | Xenopus mRNA for APEG protein, containing a highly | 0.65 | |
| | | repetitive amino acid sequence | | |
| 699 | AF097906 | Rana catesbeiana myosin heavy chain (MHC-3) mRNA, | 0.64 | |
| 700 | X64724 | M. musculus NKR-P1 2 gene for natural killer cell receptor, | 0.62 | |
| 701 | NM_001462.1 | Homo sapiens formyl peptide receptor-like 1 (FPRL1) | 0.61 | |
| | | mRNA > :: gb\|M84562\|HUMFPRL1A Human formyl | | |
| | | peptide receptor-like receptor (FPRL1) mRNA, complete | | |
| 702 | AF110966.1 | HIV-1 isolate C-96BW04.10 country Botswana, complete | 0.6 | |
| 703 | Y10743 | S. scrofa mRNA for p120-PI3K protein | 0.6 | |
| 704 | U39669 | Xenopus laevis pyruvate dehydrogenase E1-beta subunit | 0.59 | |
| | | (PdhE1beta-2) mRNA, partial cds | | |
| 705 | AJ004952 | Bos taurus mRNA for fibroblast growth factor receptor type | 0.59 | |
| 706 | AF125454 | Caenorhabditis elegans cosmid Y47G7C | 0.59 | |
| 707 | X59002 | Leukemogenic retrovirus T1223/B env gene | 0.59 | |
| 708 | Z73039 | S. cerevisiae chromosome VII reading frame ORF YGR254w | 0.59 | |
| 709 | Z28236 | S. cerevisiae chromosome XI reading frame ORF YKR011c | 0.58 | |
| 710 | U39669 | Xenopus laevis pyruvate dehydrogenase E1-beta subunit | 0.58 | |
| | | (PdhE1beta-2) mRNA, partial cds | | |
| 711 | Z16651 | H. sapiens (D10S199) DNA segment contaming | 0.58 | |
| 712 | X60163 | Human TSK39.1 telomere junction | 0.58 | |
| 713 | D10465 | Zymomonas mobilis invA gene for intracellular invertase | 0.58 | |
| | | E1, complete cds | | |
| 714 | Z33280 | M. capricolum DNA for CONTIG MC376 | 0.57 | |
| 715 | AF012899 | Sambucus nigra ribosome inactivating protein precursor | 0.57 | |
| | | mRNA, complete cds | | |
| 716 | AB014572 | Homo sapiens mRNA for KIAA0672 protein, complete cds | 0.57 | |
| 717 | NM_002714.1 | Homo sapiens protein phosphatase 1, regulatory subunit 10 | 0.57 | |
| | | (PPP1R10) mRNA > :: emb\|Y13247\|HSFB19 Homo sapiens | | |
| 718 | M10630 | Bacteriophage U3 cleavage site for phage phi-X174 gene A | 0.56 | |
| 719 | Z55474 H. sapiens CpG island DNA genomic Mse1 fragment, clone | 0.56 | | |
| | | 42d3, reverse read cpg42d3.rt1a | | |
| 720 | U96697 | Drosophila melanogaster DPP2C1 (dpp2c1) mRNA, | 0.56 | |
| 721 | AC001048 | Homo sapiens (subclone 1_f12 from P1 H55) DNA | 0.56 | |
| 722 | M32245 | Human aromatase gene, 5′ flank. | 0.55 | |
| 723 | AF051944 | Gallus gallus Xin mRNA, complete cds | 0.55 | |
| 724 | AF077539 | Caenorhabditis elegans cosmid T25D3 | 0.54 | |
| 725 | U43841 | Entamoeba histolytica U6 small nuclear RNA gene, | 0.54 | |
| | | complete sequence | | |
| 726 | NM_000551.1 | Homo sapiens von Hippel-Lindau syndrome (VHL) mRNA, | 0.54 | |
| | | and translated products | | |
| 727 | U55215 | Cavia porcellus interleukin-5 receptor alpha precursor (gpIL- | 0.53 | |
| | | 5ra) mRNA, complete cds | | |
| 728 | D16471 | Human mRNA, Xq terminal portion | 0.53 | |
| 729 | X76245 | S. cerevisiae NOP77 gene for essential nucleolar protein | 0.52 | |
| 730 | Z11993 | V. proteolyticus aminopeptidase | 0.51 | |
| 731 | L34620 | Eubacterium fosser 16S ribosomal RNA. | 0.49 | |
| 732 | U28757 | Sus scrofa lysozyme gene, complete cds | 0.49 | |
| 733 | U75187 | Arabidopsis thaliana germin-like protein (GLP1) mRNA, | 0.49 | |
| 734 | Z96514 | H. sapiens telomeric DNA sequence, clone 2PTEL005, read | 0.48 | |
| | | 2PTELOO005.seq | | |
| 735 | AE000579.1 | Helicobacter pylori 26695 section 57 of 134 of the complete | 0.48 | |
| 736 | Y13852 | Drosophila diplacantha clone D3 inactive Ban-1 family | 0.47 | |
| 737 | X14036 | Tomato cab-7 gene for type II chlorophyll a/b-binding | 0.47 | |
| 738 | X84308 | H. vulgare mRNA for photosysteme I antenna protein | 0.47 | |
| 739 | S78378 | Oct-4 (t12 haplotype) [mice, Genomic, 1191 nt, segment | 0.46 | |
| 740 | NM_000254.1 | Homo sapiens 5-methyltetrahydrofolate-homocysteine | 0.46 | |
| | | methyltransferase synthase mRNA, complete cds | | |
| 741 | L04161 | Plasmodium falciparum (clone Pfg377 [PfsXLX]) DNA | 0.46 | |
| | | sequence, complete cds | | |
| 742 | X95887 | H. sapiens PLP gene, intron 1 | 0.45 | |
| 743 | U38179 | Rattus norvegicus cyclic nucleotide phosphodiesterase | 0.45 | |
| | | (RNPDE3A) mRNA, complete cds. | | |
| 744 | U41833 | Macaca mulatta MHC class I antigen Mamu B*02 mRNA, | 0.45 | |
| | | complete cds | | |
| 745 | L01794 | Plasmid pAD1 (from Enterococcus faecalis) replication- | 0.45 | |
| | | associate protein (repA, repB, and repC) genes, complete | | |
| 746 | U64573 | Human connexin43 gap junction protein (connexin43) gene, | 0.44 | |
| | | exon 1 and promoter region | | |
| 747 | X60832 | P. sativum gene (GS 3A) for glutamine synthase | 0.44 | |
| 748 | Z93997 | Unidentified bacterium DNA for 16S ribosomal RNA | 0.44 | |
| 749 | U32818 | Haemophilus influenzae Rd section 133 of 163 of the | 0.44 | |
| 750 | AF018161 | Sphaerozoum punctatum 16S-like ribosomal RNA gene, | 0.44 | |
| | | complete sequence | | |
| 751 | D78156 | Human mRNA for rasGTPase activating protein, partial cds | 0.44 | |
| 752 | AB000173 | Porcine mRNA for endopeptidase 24.16, complete cds | 0.44 | |
| 753 | M36626 | Rat simple sequence DNA, clone 5. | 0.44 | |
| 754 | Y09922 | M. musculus flanking region of exon 1 of SEZ-6 gene | 0.44 | |
| | | including promoter sequence | | |
| 755 | X13602 | Caldocellum saccharolyticum celB gene for | 0.44 | |
| | | cellobiohydrolase/endocellulase | | |
| 756 | AF005664 | Homo sapiens properdin (PFC) gene, complete cds | 0.44 | |
| 757 | M63312 | Chinese hamster cAMP-dependent protein kinase, catalytic | 0.44 | |
| | | subunit-beta mRNA, complete cds. | | |
| 758 | U43382 | Human Down Syndrome region of chromosome 21 DNA. | 0.44 | |
| 759 | U75187 | Arabidopsis thaliana germin-like protein (GLP1) mRNA, | 0.44 | |
| 760 | U21914 | Human duplicate spinal muscular atrophy mRNA, clone | 0.43 | |
| | | 5G7, partial cds. | | |
| 761 | AF010537 | Plasmodium falciparum microsatellite TA3 sequence | 0.43 | |
| 762 | X05034 | Rat C2A gene for prostatic binding protein (PBP) | 0.43 | |
| 763 | D16579 | Dictyostelium discoideum mitochondrial DNA for NADH | 0.43 | |
| | | dehydrogenase subunits and cytochrome oxidase subunit | | |
| 764 | M58155 | African swine fever virus multigene families 360 and 110. | 0.43 | |
| 765 | Z82587 | R. prowazekii genomic DNA fragment (clone A315R) | 0.43 | |
| 766 | X13011 | Bacillus subtilis DNA for glyceraldehyde-3-phosphate | 0.43 | |
| | | dehydrogenase (EC 1.2.1.12) | | |
| 767 | X59952 | T. thermophila SB2040 micronuclear limited DNA element | 0.43 | |
| 768 | Z70730 | L. lactis gene for beta-phosphoglucomutase | 0.43 | |
| 769 | X94445 | S. pombe cwl1 gene | 0.43 | |
| 770 | X63628 | S. pombe MFm2 gene | 0.43 | |
| 771 | X60049 | O. berteriana mitochondrial nad5 gene for NADH | 0.43 | |
| | | dehydrogenase subunit 5, exons d and e | 0.43 | |
| 772 | D45241 | Rat MHC class II gene (RTI.DOa), exon 2, 3, 4 and 5 | 0.43 | |
| 773 | D83472.1 | Bos taurus gene for adrenodoxin reductase, exon 1, 2 | 0.43 | |
| 774 | M34044 | Pig Na+/glucose cotransporter protein (SGLT1) mRNA, 3′ | 0.43 | |
| 775 | U28488 | Human putative G protein-coupled receptor (AZ3B) mRNA, | 0.43 | |
| | | complete cds | | |
| 776 | X89398 | H. sapiens ung gene for uracil DNA-glycosylase | 0.43 | |
| 777 | Z36879 | F. pringlei gene for P-protein of the glycine cleavage | 0.43 | |
| 778 | M73760 | Mouse serine protienase, complete cds. | 0.43 | |
| 779 | Z36803 | H. sapiens pl (xs141) mRNA, 355 bp | 0.43 | |
| 780 | M33940 | Human Val-tRNA and Lys-tRNA genes. | 0.43 | |
| 781 | M96159 | Rattus norvegicus adenylyl cyclase type V mRNA, complete | 0.43 | |
| 782 | X54134 | Human HPTP epsilon mRNA for protein tyrosine | 0.43 | |
| 783 | Z73039 | S. cerevisiae chromosome VII reading frame ORF YGR254w | 0.43 | |
| 784 | AB002312 | Human mRNA for KIAA0314 gene, partial cds | 0.43 | |
| 785 | AB002312 | Human mRNA for KIAA0314 gene, partial cds | 0.43 | |
| 786 | U88667 | Human ATP binding cassette transporter (ABCR) mRNA, | 0.43 | |
| | | complete cds | | |
| 787 | U88667 | Human ATP binding cassette transporter (ABCR) mRNA, | 0.43 | |
| | | complete cds | | |
| 788 | Z65552 | H. sapiens CpG island DNA genomic Mse1 fragment, clone | 0.43 | |
| | | 46b12, reverse read cpg46b12.rt1a | | |
| 789 | X15599 | Phanerochaete chrysosporium LIP2 gene for lignin | 0.43 | |
| 790 | U22106 | Drosophila melanogaster dpoamine D1-like receptor mRNA, | 0.43 | |
| | | partial cds. | | |
| 791 | M13177 | Mouse transforming growth factor beta mRNA | 0.43 | |
| 792 | NM_002135.1 | Homo sapiens hormone receptor (growth factor-inducible | 0.42 | |
| | | nuclear protein N10) (HMR) mRNA > :: | | |
| | | gb\|L13740\|HUMTR3E Human TR3 orphan receptor mRNA. | | |
| 793 | U19617 | Mus musculus Ets-family transcription factor Elf-1 mRNA, | 0.42 | |
| | | complete cds | | |
| 794 | M60858 | Human nucleolin gene, complete cds. | 0.42 | |
| 795 | Z71179 | Caenorhabditis elegans cosmid F07D3, complete sequence | 0.42 | |
| | | [Caenorhabditis elegans] | | |
| 796 | Z11804 | D. discoideum ras gene | 0.42 | |
| 797 | L07572 | Equus caballus (clone GEN2-9) germline Ig lambda chain | 0.42 | |
| | | gene, J4-C4 region, last 2 exons. > :: gb\|L07573\|HRSIGLL | | |
| | | Equus caballus (clone HVL1) germline Ig lambda chain | | |
| 798 | L25637 | Xenopus laevis HNF-3beta gene, complete cds. | 0.42 | |
| 799 | AE000293 | Escherichia coli K-12 MG1655 section 183 of 400 of the | 0.42 | |
| | | complete genome | | |
| 800 | Z55829 | H. sapiens CpG island DNA genomic Mse1 fragment, clone | 0.42 | |
| | | 68a3, forward read cpg68a3.ft1a | | |
| 801 | Y11280 | A. vinelandii yoh-1, ibpB, cynR, leuC, leuD, leuB, asd, usg-1 | 0.42 | |
| 802 | Y08925 | P. falciparum aarp3 gene, exon | 0.42 | |
| 803 | X89961 | H. sapiens DNA for MCS gene | 0.42 | |
| 804 | X82330 | A. hypogaea chi2.2 gene for chitinase (class II) | 0.42 | |
| 804 | D89655 | Rattus norvegicus mRNA for scavenger receptor class B, | 0.42 | |
| | | complete cds | | |
| 806 | U70730 | Human SnoN2 mRNA, complete cds | 0.42 | |
| 807 | Y09922 | M. musculus flankin region of exon 1 of SEZ-6 gene | 0.42 | |
| | | including promotoer sequence | | |
| 808 | X57638 | Mouse mRNA for peroxisome proliferator activated receptor | 0.42 | |
| 809 | M33196 | Human Fc-epsilon-receptor gamma-chain gene, complete | 0.42 | |
| 810 | X13602 | Caldocellum saccharolyticum celB gene for | 0.42 | |
| | | cellobiohydrolase/endocellulase | | |
| 811 | X13602 | Caldocellum saccharolyticum celB gene for | 0.42 | |
| | | cellobiohydrolase/endocellulase | | |
| 812 | U23947 | Mycoplasma pulmonis putative lipoprotein (lipA), VsaB | 0.42 | |
| | | lipoprotein (vsaB), VsaC2 lipoprotein (vsaC2), VsaE2 | | |
| | | lipoprotein (vsaE2), VsaD lipoprotein (vsaD) genes, partial | | |
| | | cds, VsaA lipoprotein (vsaA) gene, complete cds, VsaC1 1 . . . | | |
| 813 | U37312 | Sus scrofa clone ARO34B cytochrome P450 aromatase | 0.42 | |
| | | mRNA, complete cds | | |
| 814 | U70998 | Phanerochaete chrysosporium manganese peroxidase | 0.42 | |
| | | isozyme 3 (mnp3) gene, complete cds | | |
| 815 | U70998 | Phanerochaete chrysosporium manganese peroxidase | 0.42 | |
| | | isozyme 3 (mnp3) gene, complete cds | | |
| 816 | X59379 | Mouse mRNA for amyloid beta precursor (protease nexin II) | 0.42 | |
| 817 | X54134 | Human HPTP epsilon mRNA for protein tyrosine | 0.42 | |
| 818 | Z32676 | H. sapiens x11 gene, promoter region | 0.42 | |
| 819 | U28938 | Rattus norvegicus protein tyrosine phosphatase D30 mRNA, | 0.42 | |
| | | complete cds | | |
| 820 | L41867 | Drosophila extra sex combs gene, exon 1-4, complete cds | 0.42 | |
| 821 | AF004659 | Andes virus G1 protein gene, partial cds | 0.42 | |
| 822 | U75187 | Arabidopsis thaliana germin-like protein (GPL1) mRNA, | 0.42 | |
| 823 | U27120 | Chlamydomonas reinhardtii ADP-ribosylation factor (ARF) | 0.42 | |
| | | mRNA, complete cds. | | |
| 824 | U41759 | Chlamydia psittaci RecJ recombination protein gene, partial | 0.41 | |
| | | cds and ORF2, ORF4, glutamyl-tRNA synthetase, outer | | |
| | | membrande protein 3 (omp3), outer membrane protein 2 | | |
| | | (omp2), and hypothetical sulfur-rich protein (srp) genes, . . . | | |
| 825 | D12716 | Candida maltosa ALK4 (CYP52D1) gene for n-alkane | 0.41 | |
| | | inducible cytochrome P-450, complete cds | | |
| 826 | J01261 | P. vulgaris lectin gene, complete cds. | 0.41 | |
| 827 | K00131 | mouse b2 repeat sequence from clone mm61. | 0.41 | |
| 828 | AF000949 | Canis familiaris keratin (KRT9) gene, complete cds | 0.41 | |
| 829 | U67580 | Methanococcus jannaschii section 122 of 150 of the | 0.41 | |
| 830 | X98568 | H. sapiens type X collagen gene | 0.41 | |
| 831 | X13595 | Bean DNA for glycine-rich cell wall protein GRP 1.0 | 0.41 | |
| 832 | Y13852 | Drosophila diplacantha clone D3 inactive Bari-1 family | 0.41 | |
| 833 | X53815 | Human G6PD gene for glucose-6-phosphate dehydrogenase | 0.41 | |
| 834 | L34069 | Bovine (clone p59K2) 3′,5′-cyclic nucleotide | 0.41 | |
| | | phosphodiesterase (BTPDE1A1) mRNA, complete cds.> :: | | |
| | | gb\|I30433\|I30433 Sequence 16 from U.S. Pat. No. 558077 > :: | | |
| | | gb\|I35677\|I35677 Sequence 16 from U.S. Pat. No. 5602019 > :: | | |
| 835 | U26425 | Human phospholipase C-beta-3 (PLCB3) gene, complete | 0.41 | |
| 836 | J04431 Homo sapiens transforming growth factor-beta 1 | 0.41 | | |
| | | gb\|I14074\|I14074 Sequence 1 from U.S. Pat. No. 5445941 | | |
| 837 | U32802 | Haemophilus influenzae Rd section 117 of 163 of the | 0.41 | |
| 838 | U24676 | Drosophila melanogaster twinstar (tsr) gene, complete cds | 0.41 | |
| 839 | U87793 | Bacillus thuringiensis kurstaki insecticidal delta-endotoxin | 0.41 | |
| | | CryIA(c) (cryIA(c)) gene, complete cds | | |
| 840 | L06446 | Mus musculus domesticus insulin-like growth factor 2 | 0.41 | |
| | | receptor (Igf2r) gene, exon 2 and partial cds | | |
| 841 | X06660 | Candida tropicalis POX9 gene for peroxisomal catalase | 0.41 | |
| | | (PXP-9) > :: dbj\|E01922\|E01922 DNA encoding catalase of | | |
| 842 | U05349 | Equine rotavirus glycoprotein VP7 mRNA, complete cds. | 0.41 | |
| 843 | L12058 | Clostridium sordellii 7-alpha-hydroxysteroid dehydrogenase | 0.41 | |
| | | gene, complete cds. | | |
| 844 | X71327 | M. musculus mRNA for MRE-binding transcription factor | 0.41 | |
| 845 | AE000534.1 | Helicobacter pylori 26695 section 12 of 134 of the complete | 0.41 | |
| 846 | L33727 | Mouse 43kDa acetylcholine receptor-associated protein | 0.41 | |
| | | (Rapsn) gene, exons 3-8 | | |
| 847 | Y11270 | E. histolytica INO1 gene | 0.41 | |
| 848 | L10390 | Camptotheca acuminata 3-hydroxy-3-methylglutaryl | 0.41 | |
| | | coenzyme A reductase gene, complete cds. | | |
| 849 | M34044 | Pig Na+/glucose cotransporter protein (SGLT1) mRNA, 3′ | 0.41 | |
| 850 | M20543 | Human skeletal alpha-actin gene, complete cds. | 0.41 | |
| 851 | U97192 | Caenorhabditis elegans cosmid C01F4 | 0.41 | |
| 852 | U65625 | Mus musculus strain BALB/c IgH C alpha gene, 3′ | 0.41 | |
| | | regulatory region enhancer E | | |
| 853 | X78344 | S. cerevisiae CAT8 gene | 0.41 | |
| 854 | Z26280 | H. sapiens isoform 1 gene for L-type calcium channel, exon | 0.41 | |
| 855 | Z23995 | H. sapiens (D1S469) DNA segment containing (CA) repeat; | 0.41 | |
| | | clone AFM280za5; single read | | |
| 856 | X51394 | Xenopus mRNA for APEG protein, containing a highly | 0.41 | |
| | | repetitive amino acid sequence | | |
| 857 | U72719 | Streptococcus agalactiae heat shock protein 70 cds | 0.41 | |
| 858 | M95673 | Saccharomyces cerevisiae pta1 gene, complete cds. | 0.41 | |
| 859 | U28938 | Rattus norvegicus protein tyrosine phosphatase D30 mRNA, | 0.41 | |
| | | complete cds | | |
| 860 | NM_001072.1 | Homo sapiens UDP glycosyltransferase 1 phenol UDP- | 0.41 | |
| | | glucuronosyltransferase (UDPGT) mRNA, complete cds. | 0.41 | |
| 861 | Z72884 | S. cerevisiae chromosome VII reading frame ORF YGR099w | 0.41 | |
| 862 | X96883 | H. sapiens spcDNA tetranucleoid and O-LTR like repeat, | 0.4 | |
| 863 | M14602 | Human myoglobin gene, exon 2. | 0.4 | |
| 864 | D00844 | Gallus gallus mRNA for virus activating protease, complete | 0.4 | |
| 865 | D49817 | Homo sapiens mRNA for 6-phosphofructo-2-kinase/fructose- | 0.4 | |
| | | 2,6-bisophosphatase, complete cds | | |
| 866 | L78742 | Homo sapiens (subclone 10_b11 from P1 H16) DNA | 0.4 | |
| 867 | X51772 | Rat DNA for calpain II large subunit (EC 3.4.22.17) (exon | 0.4 | |
| 868 | U09473 | Luxilus chrysocephalus chrysocephalus Meramec R., | 0.4 | |
| | | Jefferson Co., MO, USA, mitochondrion 12S rRNA and 16S | | |
| | | rRNA genes, partial sequence, and tRNA-Val gene, | | |
| 869 | X52614 | Maize chloroplast rps15 gene for ribosomal protein S15 | 0.4 | |
| 870 | U76524 | Sambucus nigra ribosome inactivating protein precursor | 0.4 | |
| | | mRNA, complete cds | | |
| 871 | M30467 | D. discoideum uridine diphosphoglucose pyrophosphorylase | 0.4 | |
| | | (UDPGP1) gene, 5′ end. | | |
| 872 | NM_002248.1 | Homo sapiens potassium intermediate/small conductance | 0.4 | |
| | | calcium-activated channel, subfamily N, member 1 | | |
| | | (KCNN1) mRNA > :: gb\|U69883\|HSU69883 Human | | |
| | | calcium-activated potassium channel hSK1 (SK) mRNA, | | |
| 873 | M81686 | Petuna hybrida Sx-protein | 0.4 | |
| 874 | S39508 | myelin P2 [mice, Genomic, 3694 nt] | | |
| 875 | U82966 | Oryza sativa Ca2+-ATPase gene, complete cds | 0.4 | |
| 876 | X16323 | Human mRNA, for hepatocyte growth factor (HGF) | 0.4 | |
| 877 | U31631 | Dictostelium discoideum class II apurinic/apyrimidinic (AP)- | 0.4 | |
| | | endonuclease (DdapeA) gene, complete cds | | |
| 878 | X60753 | P. sylvestris BBS gene for bibenzyl synthase | 0.4 | |
| 879 | V00711 | Mus musculus mitochondrial genome > :: | 0.4 | |
| | | gb\|J01420\|MUSMTCG Mouse mitochondrion, complete | | |
| 880 | U66274 | Rattus norvegicus neuropeptide Y5 receptor (NPYR5) | 0.4 | |
| | | mRNA, complete cds | | |
| 881 | X83673 | X. laevis SSB1 gene | 0.4 | |
| 882 | X14036 | Tomato cab-7 gene for type II chlorophyll a/b-binding | 0.4 | |
| 883 | U76524 | Sambucus nigra ribosome inactivating protein precursor | 0.4 | |
| | | mRNA, complete cds | | |
| 884 | X64467 | H. sapiens ALAD gene for porphobilinogen synthase | 0.4 | |
| 885 | L81673 | Homo sapiens (subclone 1_f8 from P1 H49) DNA sequence | 0.4 | |
| 886 | L36887 | Saccharomyces cerevisiae mitochondrion transfer RNA- | 0.4 | |
| | | Leu, Gln, Lys, Arg, Gly, Asp, Ser2, Arg2, Ala, Ile, Tyr, Asn | | |
| 887 | L24905 | Bombyx mori nuclear polyhedrosis virus hr5 gene. | 0.4 | |
| 888 | K00841 | human beta-tubulin pseudogene, clone 21-beta. | 0.4 | |
| 889 | K02819 | Rabbit MHC RLA region class I 19-1 gene, complete cds. | 0.4 | |
| 890 | L24905 | Bombyx mori nuclear polyhedrosis virus hr5 gene. | 0.4 | |
| 891 | X69491 | G. gallus gene for gonadotroyhin releasing hormone I | 0.4 | |
| 892 | X95887 | H. sapiens PLP gene, intron 1 | 0.4 | |
| 893 | Z96576 | H. sapiens telomeric DNA sequence, clone 3PTEL001, read | 0.4 | |
| | | 3PTELOO001.seq | | |
| 894 | Z16503 | H. sapiens (D1S196) DNA segment containing (CA) repeat; | 0.4 | |
| | | clone AFM063xg9; single read | | |
| 895 | M20572 | Mouse interleukin 6 (IL-6) gene, complete cds. | 0.4 | |
| 896 | AF022372 | Candida albicans proteinase (Kex2) gene, complete cds | 0.4 | |
| 897 | Z77964 | H. sapiens flow-sorted chromosome 6 HindIII fragment, | 0.4 | |
| 898 | Z58874 | H. sapiens CpG island DNA genomic Mse1 fragment, clone | 0.4 | |
| | | 110g9, reverse read cpg110g9.rt1a | | |
| 899 | X53422 | D. grimshawi s18, s15, s19 and s16 chorion protein genes | 0.4 | |
| 900 | NM_002435.1 | Homo sapiens mannose phosphate isomerase (MPI) mRNA > | 0.4 | |
| | | :: emb\|76057\|HSRPMI H. sapiens PMI1 mRNA for | | |
| | | phosphomannose isomerase | | |
| 901 | X05914 | D. virilis mitochondrial DNA for origin of replication, small | 0.4 | |
| | | mitochondrial ribosomal RNA, transer tRNAs tRNA-fMet, | | |
| | | tRNA-Gln and tRNA-Ile | | |
| 902 | Z95179 | G. gallus microsatellite DNA (LEI0290 (= EC11EO7)) | 0.4 | |
| 903 | X65627 | M. musculus mRNA TNZ2 for p68 RNA helicase | 0.4 | |
| 904 | U87940 | Salmonella typhimurium hydroxyethyl thiazole kinase (thiM) | 0.4 | |
| | | and HMP-P kinase (thiD) genes, complete cds | | |
| 905 | U15450 | Sus scrofa clone pvg13 Ig heavy chain variable VDJ region | 0.4 | |
| | | mRNA, partial cds. | | |
| 906 | M27902 | Rat cardiac specific sodium channel alpha-subunit mRNA, | 0.4 | |
| | | complete cds. | | |
| 907 | U22893 | Rattus norvegicus muscle Y-box protein YB2 mRNA, | 0.4 | |
| 908 | NM_003632.1 | Homo sapiens neurexin 4 (contactin associated protein) | 0.4 | |
| | | (NRXN4) mRNA > :: gb\|U87223\|HSU87223 Homo sapiens | | |
| | | contactin associated protein (Caspr) mRNA, complete cds | | |
| 909 | AF001504 | Homo sapiens myasthenia gravis autoantigen gravin mRNA, | 0.4 | |
| | | partial cds | | |
| 910 | AB002384 | Human mRNA for KIAA0386 gene, complete cds | 0.4 | |
| 911 | U40145 | Mus musculus Mdm2 (Mdm2) gene, complete cds. | 0.4 | |
| 912 | NM_002714.1 | Homo sapiens protein phosphatase 1, regulatory subunit 10 | 0.4 | |
| | | (PPP1R10) mRNA > :: emb\|Y13247\|HSFB19 Homo sapiens | | |
| 913 | Y09762 | Mokola virus genes encoding nucleoprotein, | 0.4 | |
| | | phosphoprotein, matrice rotein, glycoprotein and | | |
| 914 | U75187 | Arabidopsis thaliana germin-liile protein (GLP1) mRNA, | 0.4 | |
| 915 | Z82448 | R. prowazekii genomic DNA fragment (clone A503F) | 0.39 | |
| 916 | Z50864 | L. delbrueckii sp. lactis plasmid pWS58 DNA, complete | 0.39 | |
| 917 | K03196 | Human interferon-beta-3 gene. | 0.39 | |
| 918 | U66614 | Marinococcus halophilus L-2,4-diaminobutyric acid acetyl | 0.39 | |
| | | transferase (ectA) gene, L-2,4-diaminobutyric acid | | |
| | | transaminase (ectB) gene, ectoine synthase (ectC) gene, | | |
| | | putative transposase orfA gene, complete cds, and putative . . . | | |
| 919 | L48522 | Homo sapiens tuberin (TSC2) gene, exons 6, 7, and 8 | 0.39 | |
| 920 | Z68133 | Caenorhabditis elegans cosmid F23C11, complete sequence | 0.39 | |
| | | [Caenorhabditis elegans] | | |
| 921 | U60973 | Candida albicans oligopeptide transporter (OPT1) gene, | 0.39 | |
| 922 | L31398 | Mus musculus dynamin (UDnm) mRNA, complete cds. | 0.39 | |
| 923 | X15966 | Rabbit DNA for L1Oc4 repeat | 0.39 | |
| 924 | Z95122 | Caenorhabditis elegans cosmid VZC374L, complete | 0.39 | |
| | | sequence [Caenorhabditis elegans] | | |
| 925 | X55036 | M. musculus long mosaic repeated sequence (LMRS) | 0.39 | |
| 926 | U35640 | Arabidopsis thaliana thioredoxin h (TRX3) gene, complete | 0.39 | |
| 927 | V00094 | Fibroin gene intervening sequence from Bombyx mori (silk | 0.39 | |
| | | moth), with 5′ flank and partial coding sequence | | |
| 928 | U47687 | Streptococcus pneumoniae immunoglobulin A1 protease | 0.39 | |
| | | (iga) gene, complete cds | | |
| 929 | Z93381 | Caenorhabditis elegans cosmid F28G4, complete sequence | 0.39 | |
| | | [Caenorhabditis elegans] | | |
| 930 | U76524 | Sambucus nigra ribosome inactivating protein precursor | 0.39 | |
| | | mRNA, complete cds | | |
| 931 | X71600 | H. sapiens DNA sequence of polymorphic pentanucleotide | 0.39 | |
| 932 | NM_000958.1 | Homo sapiens prostaglandin E receptor 4 sapiens | 0.39 | |
| | | prostaglandin E2 receptor EP2 subtype mRNA, complete | | |
| | | cds. > :: gb\|I36298\|I36298 Sequence 1 from U.S. Pat. No. | | |
| 933 | Y07648 | A. thaliana nit2 gene, nit1 gene and nit3 gene | 0.39 | |
| 934 | Y13852 | Drosophila diplacantha clone D3 inactive Bari-1 family | 0.39 | |
| 935 | M57851 | Human S protein-alpha (PS-alpha) gene, exon 13. | 0.39 | |
| 936 | X52270 | Maize chloroplast 3′part of rpoC2 gene, rps2 gene, atpI gene | 0.39 | |
| | | and 5′part of atpH gene | | |
| 937 | U50948 | Rattus norvegicus taste bud receptor protein TB 567 (TB | 0.39 | |
| | | 567) gene, complete cds | | |
| 938 | X60435 | H. sapiens gene PACAP for pituitary adenylate cyclase | 0.39 | |
| | | activating polypeptide | | |
| 939 | U12972 | Tetrahymena thermophila CU428.1VII micronuclear R | 0.39 | |
| 940 | X54709 | Kluyveromyces lactis BiP gene for BiP/GRP78 | 0.39 | |
| 941 | Z73360 | Human DNA sequence from cosmid 92M18, BRCA2 gene | 0.39 | |
| | | region chromosome 13q12-13 | | |
| 942 | L13841 | Plasmid pX01 (from Bacillus anthracis UM23-1) trans- | 0.39 | |
| | | acting positive regulator (Atx A) gene, complete cds. | | |
| 943 | Z72554 | S. cerevisiae chromosome VII reading frame ORF YGL032c | 0.39 | |
| 944 | L24905 | Bombyx mori nuclear polyhedrosis virus hr5 gene. | 0.39 | |
| 945 | Z11486 | Pinus strobus L. mRNA for pine globulin-1 | 0.39 | |
| 946 | X70675 | M. musculus gene for MERANTES protein | 0.39 | |
| 947 | AF010537 | Plasmodium falciparum microsatellite TA3 sequence | 0.39 | |
| 948 | X78219 | D. melanogaster (Barton) SED5 mRNA | 0.39 | |
| 949 | D42055 | Human mRNA for KIAA0093 gene, partial cds | 0.39 | |
| 950 | Z30698 | Rinderpest virus (RBOK) RNA for RNA polyinerase (L) | 0.39 | |
| 951 | M64715 | Plasmodium falciparum DNA polymerase-delta gene, | 0.39 | |
| 952 | Z32774 | H. sapiens gene for N-methyl-D-aspartate receptor R1 exons | 0.39 | |
| 953 | U70998 | Phanerochaete chrysosporium manganese peroxidase | 0.39 | |
| | | isozyme 3 (mnp3) gene, complete cds | | |
| 954 | Z72884 | S. cerevisiae chromosome VII reading frame ORF YGR099w | 0.39 | |
| 955 | S78378 | Oct-4 (t12 haplotype) [mice, Genomic, 1191 nt, segment 3 | 0.39 | |
| 956 | U78098 | Pyrococcus furiosus ribonucleotide reductase (rnr) gene, | 0.38 | |
| | | complete cds | | |
| 957 | U78857 | Rattus norvegicus protein serine/threonine kinase CPG167 | 0.38 | |
| | | (cpg16) mRNA, complete cds | | |
| 958 | Z54096 | S. pombe chromosome I cosmid c13A11 | 0.38 | |
| 959 | Z72778 | S. cerevisiae chromosome VII reading frame ORF YGL256w | 0.38 | |
| 960 | D14718 | Human chromosomal protein HMG1 related gene | 0.38 | |
| 961 | U09138 | Mus musculus peroxisome proliferator activated protein- | 0.38 | |
| | | gamma-2 mRNA, complete cds. | | |
| 962 | U32818 | Haemophilus influenze Rd section 133 of 163 of the | 0.38 | |
| 963 | X89398 | H. sapiens ung gene for uracil DNA-glycosylase | 0.38 | |
| 964 | X69440 | N. tabacum NTP303 gene | 0.38 | |
| 965 | U62660 | Toxoplasma gondii micronemal protein MIC2, complete cds | 0.38 | |
| 966 | AE000042 | Mycoplasma pneumoniae section 42 of 63 of the complete | 0.38 | |
| 967 | V00190 | Gene for small nuclear RNA D2 of slime mold (D. | 0.38 | |
| 968 | X98568 | H. sapiens type X collagen gene | 0.38 | |
| 969 | U54776 | Human NTT gene, L1, Alu, and MER 38 repeat regions | 0.38 | |
| 970 | Z72888 | S. cerevisiae chromosome VII reading frame ORF YGR103w | 0.38 | |
| 971 | U97128 | Plasmodium falciparum HMG-like protein Pf16 (Pf16) | 0.38 | |
| | | mRNA, partial cds | | |
| 972 | J02846 | Human tissue fact or gene, complete cds. | 0.38 | |
| 973 | J00803 | Sheep corticotropin-releasing factor (CRF) mRNA, complete | 0.38 | |
| 974 | X04310 | Rat thymocyte mRNA for 37K of CD8 antigen | 0.38 | |
| 975 | Y13129 | Rickettsia akari fmt gene, partial | 0.38 | |
| 976 | X95099 | C. albicans mRNA for neutral trehalase | 0.38 | |
| 977 | D83948 | Rat adult liver mRNA for S1-1 protein, complete cds | 0.38 | |
| 978 | Z84722 | Human DNA sequence from cosmid GG4 from a contig | 0.38 | |
| | | from the tip of the short arm of chromosome 16, spanning | | |
| 979 | U40604 | Listeria monocytogenes ClpC ATPase (mec) gene, complete | 0.38 | |
| 980 | Z92808 | Caenorhahditis elegans cosmid M04C3, complete sequence | 0.38 | |
| | | [Caenorhabditis elegans] | | |
| 981 | X91882 | Z. mays ZEMa gene | 0.38 | |
| 982 | M26394 | M. sexta larval cuticle protein (LCP-14) gene, exon 1. | 0.38 | |
| 983 | U32021 | Gossypium tomentosum 5S ribosomal RNA gene and non- | 0.38 | |
| | | transcribed spacer, clone 11 | | |
| 984 | X54061 | D. melanogaster mRNA coding for a 205K microtubule- | 0.38 | |
| | | associated protein (MAP) | | |
| 985 | X14612 | Chicken c-myb proto-oncogene 5′region exons 1-5 | 0.38 | |
| 986 | U12594 | Sus scrofa immunoglobulin alpha heavy chain constant | 0.38 | |
| | | region (IgA C alpha) mRNA, partial cds. | | |
| 987 | U64841 | Caenorhabditis elegans cosmid ZC142. | 0.38 | |
| 988 | M93148 | Mouse homeobox protein (Hox-1.11) gene, complete cds. | 0.38 | |
| 989 | X14049 | Canis familiaris RDC4 mRNA for G protein-coupled | 0.38 | |
| 990 | X94616 | M. musculus mRNA for glycogen synthase | 0.38 | |
| 991 S78378 | Oct-3 (t12 haplotype) [mice, Genomic, 1191 nt, segment 3 | 0.38 | | |
| 992 | D50091 | Drosophila ezoana G-3-P dehydrogenase | 0.37 | |
| 993 | Y11874 | M. musculus uPA gene, promoter sequence | 0.37 | |
| 994 | X63628 | S. pombe MFm2 gene | 0.37 | |
| 995 | Z69652 | Human DNA sequence from cosmid L75B9, Huntington's | 0.37 | |
| | | Disease Region, chromosome 4p16.3 | | |
| 996 | Y08305 | L. esculentum lap17.1a gene, promoter region and CDS | 0.37 | |
| 997 | U64453 | Human ELK1 pseudogene (ELK2) and immunoglobulin | 0.37 | |
| | | heavy chain gamma pseudogene (IGHGP) | | |
| 998 | X82286 | H. sapiens Fas, Apo-1 gene (exon IX) | 0.37 | |
| 999 | Z48231 | E. coli IncQ plasmid pIE639 sat3 gene and aphA gene | 0.37 | |
| 1000 | L36679 | Amycolatopsis methanolica plasmid pMEA300 stf gene, | 0.37 | |
| 1001 | X95275 | P. falciparum complete gene map of plastid-like DNA | 0.37 | |
| 1002 | Z58565 | H. sapiens CpG island DNA genomic Mse1 fragment, clone | 0.37 | |
| | | 44a5 forward read cpg44a5ft1a | | |
| 1003 | L14625 | Arcobacter skirrowi 16S ribosomal RNA. | 0.37 | |
| 1004 | U72236 | Dictyostelium discoideum ModA (modA) gene, complete | 0.37 | |
| 1005 | X73940 | B. taurus microsatellite DNA INRA190 | 0.37 | |
| 1006 | L06092 | Mesocricetus auratus acidic fibroblast growth factor gene, 5′ | 0.37 | |
| | | flank and non-coding exon 1. | | |
| 1007 | X98918 | Human rotavirus gene encoding outer capsid glycoprotein | 0.37 | |
| 1008 | X14448 | Human GLA gene for alpha-D-galactosidase A (EC | 0.37 | |
| 1009 | AF003533 | Homo sapiens cytosolic phagocyte oxidase protein | 0.37 | |
| 1010 | X67711 | O. sativa hsp70 gene for heat shock protein 70 | 0.37 | |
| 1011 | Z33465 | B. occidentalis gene for 18S rRNA | 0.37 | |
| 1012 | Z12652 | R. norvegicus upstream of gene for catechol | 0.37 | |
| 1013 | U45934 | Human papillomavirus type 68, isolate IS362, major capsid | 0.37 | |
| | | protein L1 (L1) gene, partial cds | | |
| 1014 | U17084 | Muman neurofibromin (NF1) gene, promoter region and | 0.37 | |
| 1015 | X95668 | B. burgdorferi gidA, gidB and moxR genes | 0.37 | |
| 1016 | X58541 | Mink mRNA for plasminogen activator inhibitor type 1 | 0.37 | |
| 1017 | U48706 | Dictyostelium discoideum small aggregate formation | 0.37 | |
| 1018 | M77176 | H. sapiens carbonic anhydrase II (CAII) gene, exons 1 and 2. | 0.37 | |
| 1019 | Z72888 | S. cerevisiae chromosome VII reading frame ORF YGR103w | 0.37 | |
| 1020 | Y13234 | Chironomus tentans mRNA for chitinase, 1695 bp | 0.37 | |
| 1021 | AF004166 | Lycopersicon pennellii 2-isopropylmalate synthase (lp- | 0.37 | |
| | | ipmsb) mRNA, complete cds | | |
| 1022 | D85240 | Aspergillus niger DNA for isopullulanase precursor, | 0.37 | |
| 1023 | Y00684 | Rabbit mRNA for gamma-subunit of phosphorylase kinase | 0.37 | |
| | | (EC 2.7.1.38) | | |
| 1024 | X54016 | D. discoideum mRNA for 24 kDa protein, homologous to C- | 0.37 | |
| | | terminal repeat sequence of rhodopsin and synaptophysin | | |
| 1025 | M22015 | Influenza virus type C (C/JJ/50) nonstructural | 0.37 | |
| 1026 | M62798 | pi F. ferrugineum 16S ribosomal RNA. | 0.37 | |
| 1027 | X76652 | M. musculus mRNA for 3f8 | 0.37 | |
| 1028 | X56047 | P. chrysosporium trpC gene for trifunctional polypeptide | 0.37 | |
| 1029 | Z74896 | S. cerevisiae chromosome XV reading frame ORF YOL154w | 0.37 | |
| 1030 | U20238 | Mus musculus GTPase-activating protein GAPIII mRNA, | 0.37 | |
| | | complete cds. | | |
| 1031 | Z54240 | L. plantarum pyrimidine biosynthetic operon genes | 0.36 | |
| 1032 | X54742 | Nicotiana plumbaginifolia beta-(1,3)-glucanase gene for a | 0.36 | |
| | | vacuolar isoform | | |
| 1033 | AF001415 | Arabidopsis thaliana 14-3-3-like protein GF14 upsilon | 0.36 | |
| | | (GRF5) gene, complete cds | | |
| 1034 | X77801 | S. beecheyi genomic DNA with direct repeats and integrated | 0.36 | |
| | | Hepatitis B virus | | |
| 1035 | Z84431 | D. ligulata internal transcribed spacer 2 DNA | 0.36 | |
| 1036 | X60753 | P. sylvestris BBS gene for bibenzyl synthase | 0.36 | |
| 1037 | D28503 | Clostridium josui hemA, hemC, hemD and hemB genes of | 0.36 | |
| | | porphyrin biosynthesis | | |
| 1038 | X66131 | R. americana mRNA for elongation factor 1-alpha | 0.36 | |
| 1039 | X69601 | B. burgdorferi p93 gene (partial) | 0.36 | |
| 1040 | M83758 | Mytilus edulis mitochondrial cytochrome oxidase subunit II | 0.36 | |
| | | (COII) gene, 3′ end and NADH dehydrogenase subunit 1 | | |
| 1041 | Z27392 | G. raimondii (D61) copia-like reverse transcriptase | 0.36 | |
| 1042 | U28832 | Infectious laryngotracheitis virus US10, US2, protein kinase, | 0.36 | |
| | | UL47, glycoprotein G, ORF5, glycoprotein D, glycoprotein | | |
| | | I, glycoprotein E, ORF9 genes, complete cds | | |
| 1043 | AB002384 | Human mRNA for KIAA0386 gene, complete cds | 0.36 | |
| 1044 | M22345 | Mouse endogenous provirus gag, pol, and env region DNA. | 0.36 | |
| 1045 | U16850 | Human calmodulin-I (CALM1) mRNA, 3′UTR, partial | 0.36 | |
| 1046 | M19197 | Dengue virus type 2 (S1 vaccine strain), complete genome. | 0.36 | |
| 1047 | Z49535 | S. cerevisiae chromosome X reading frame ORF YJR035w | 0.36 | |
| 1048 | Z74369 | S. cerevisiae chromosome IV reading frame ORF YDR073w | 0.36 | |
| 1049 | S78378 | Oct-4 (t12 haplotype) [mice, Genomic, 1191 nt, segment 3 | 0.36 | |
| 1050 | X60686 | B. taurus mRNA for transglutaminase | 0.36 | |
| 1051 | NM_001670.1 | Homo sapiens armadillo repeat gene deleted in velo-cardio- | 0.35 | |
| | | facial syndrome (ARVCF) mRNA > :: | | |
| | | gb\|U51269\|HSU51269 Human armadillo repeat protein | | |
| 1052 | X63149 | Y. enterocolitica ampC and ampR genes for beta-lactamase | 0.35 | |
| | | and AmpR regulatory protein | | |
| 1053 | L25779 | Kluyveromyces lactis (HAP3) gene, complete cds, | 0.35 | |
| 1054 | U77368 | Listeria monocytogenes internalin (in1C2), in1D, and in1E | 0.35 | |
| | | genes, complete cds | | |
| 1055 | M62750 | Homo sapiens intergenic locus pYNZ32 variable number | 0.35 | |
| | | tandem repeat (VNTR) sequence associated with Huntington | | |
| 1056 | K03073 | Slime mold (D. discoideum) mRNA complementary to the | 0.35 | |
| | | right inverted terminal repeat of DIRS-1, clone pLZ12. | | |
| 1057 | U78025 | Sus scrofa microsatellite S0399 sequence | 0.35 | |
| 1058 | M17478 | Drosophila melanogaster transformer (tra) gene, complete | 0.35 | |
| | | cds, and non-sex-specific transformer processed pseudogene | | |
| 1059 | L09708 | Homo sapiens complement component 2 (C2) gene allele b, | 0.35 | |
| | | exons 10 through 18 and complete cds | | |
| 1060 | Z16708 | H. sapiens (D6S275) DNA segment containing | 0.35 | |
| 1061 | M74201 | Rabbit cytochrome P450IIC4 (CYP2C4) gene, exons 2 and | 0.35 | |
| 1062 | U63634 | Mesembryanthemum crystallinum inositol methyltransferase | 0.35 | |
| | | (Imt1) gene, complete cds | | |
| 1063 | U73126 | Oryctolagus cuniculus calcitonin receptor isoform mRNA, | 0.35 | |
| | | complete cds | | |
| 1064 | X52614 | Maize chloroplast rps15 gene for ribosomal protein S15 | 0.35 | |
| 1065 | X52614 | Maize chloroplast rps15 gene for ribosomal protein S15 | 0.35 | |
| 1066 | X57520 | L. micdadei DNA for gro ELS operon | 0.35 | |
| 1067 | D38574 | Pyrodictium occultum polB gene for DNA polymerase II | 0.35 | |
| | | (family B) (alpha-like DNA polymerase), complete cds | | |
| 1068 | Z47075 | Caenorhabditis elegans cosmid E02H1, complete sequence | 0.35 | |
| | | [Caenorhabditis elegans] | | |
| 1069 | Y10686 | C. capreolus DNA, tandem repeat region | 0.35 | |
| 1070 | U17771 | Blaberus giganteus mitochondrion 16S ribosomal RNA, | 0.35 | |
| | | partial sequence | | |
| 1071 | U12186 | Oryctolagus cuniculus sodium/dicarboxylate cotransporter | 0.35 | |
| | | mRNA, partial cds. | | |
| 1072 | L25677 | Schizosaccharomyces pombe cdc42+ (Cdc42p) gene, | 0.35 | |
| 1073 | X63628 | S. pombe MFm2 gene | 0.35 | |
| 1074 | D67071 | Rat gene for regucalcin, exon1 (non-coding exon) | 0.35 | |
| 1075 | X93218 | Impatiens necrotic spot virus L gene | 0.35 | |
| 1076 | U16301 | Human lysyl hydroxylase (PLOD) gene, intron 15, complete | 0.35 | |
| 1077 | M37277 | Human Ig germline H-chain D-region genes, partial cds. | 0.35 | |
| 1078 | X14448 | Human GLA gene for alpha-D-galactosidase A (EC | 0.34 | |
| 1079 | X79930 | O. gibsoni Tbb gene | 0.34 | |
| 1080 | Z37352 | H. sapiens rearranged immunoglobulin lambda light chain V- | 0.34 | |
| | | region (V1-3 | ) | |
| 1081 | X59013 | Rat mRNA for trypsin V b-form | 0.34 | |
| 1082 | X90761 | Homo sapiens hHa2 gene | 0.33 | |
| 1083 | L23498 | Bovine microsatellite repeats | 0.33 | |
| 1084 | Z18361 | O. aries trichohyalin | 0.33 | |
| 1085 | L18785 | Plasmodium falciparum DNA polymerase alpha (Pol alpha) | 0.33 | |
| 1086 | X96685 | B. burgdorferi cell division genes | 0.33 | |
| 1087 | M58509 | Human adrenodoxin reductase gene, exons 3 to 12 | 0.33 | |
| 1088 | X70809 | C. reptans gene for 18S ribosomal RNA | 0.32 | |
| 1089 | D38116 | Pygmy chimpanzee mitochondrial DNA, complete sequence | 0.32 | |
| 1090 | U00310 | Human immunodeficiency virus type 1 isolate 583-78 | 0.31 | |
| | | envelope glycoprotein, V3 region (env) gene, partial cds. | | |
| 1091 | L35670 | Homo sapiens (subclone H8 10_g5 from P1 35 H5 C8) DNA | 0.3 | |
| 1092 | M63960 | Human protein phosphatase-1 catalytic subunit mRNA, | 0.3 | |
| 1093 | Z50747 | C. psittaci DNA for kdsA, dsk1 and dsk2 genes | 0.22 | |
| 1094 | M80515 | Streptococcus pneumoniae uvs402 protein gene, complete | 0.22 | |
| 1095 | M98776 | Human keratin 1 gene, complete cds | 0.22 | |
| 1096 | X66313 | H. sapiens GLUDP2 gene (exon 2) | 0.21 | |
| 1097 | AB001025 | Homo sapiens mRNA for brain ryanodine receptor, complete | 0.21 | |
| 1098 | AE000956 | Archaeogiobus fulgidus section 151 of 172 of the complete | 0.21 | |
| 1099 | Z46268 | Simian herpesvirus B DNA for glycoprotein G | 0.21 | |
| 1100 | X99403.1 | N. tabacum mRNA for defensin | 0.21 | |
| 1101 | U20335 | Drosophila pseudoobscura EP arrangement, BC p430#44 | 0.21 | |
| | | pAP5 clone alpha-amylase (amy1) gene, complete cds. > :: | | |
| | | gb\|U20337\|DPU20337 Drosophila pseudoobscura HI | | |
| | | arrangernent, Mex a-176x pAP9 clone alpha-amylase (amy1) | | |
| 1102 | X04077 | Potato patatin pseudogene (SB6B) | 0.2 | |
| 1103 | L11236 | Rattus rattus mRNA sequence. | 0.2 | |
| 1104 | X63547 | H. sapiens mRNA for tre oncogene (clone 213) > :: | 0.2 | |
| | | gb\|I76205\|I76205 Sequence 9 from U.S. Pat. No. 5691147 | | |
| 1105 | M69051 | Human liver glucokinase (ATP:D-hexose 6- | 0.2 | |
| | | phosphotransferase) mRNA, complete cds. | | |
| 1106 | U14950 | Rattus norvegicus synapse-associated protein 97 mRNA, | 0.2 | |
| | | complete cds. | | |
| 1107 | NM_002583.1 | Homo sapiens PRKC, apoptosis, WT1, regulator apoptosis | 0.2 | |
| | | response protein par-4 mRNA, complete cds | | |
| 1108 | X66313 | H. sapiens GLUDP2 gene (exon 2) | 0.2 | |
| 1109 | U48485 | Human skeletal muscle ryanodine receptor gene | 0.2 | |
| 1110 | AF018116 | Dendroica pityophila cytochrome oxidase I protein, partial | 0.2 | |
| 1111 | X87108 | S. cerevisiae CKI3 gene | 0.19 | |
| 1112 | M55249 | E. coli retron Ec67 DNA encoding reverse transcriptase and | 0.19 | |
| | | Dam methylase functions. | | |
| 1113 | L06898 | Actinomyces viscosus sialidase (nanH) gene, complete cds. | 0.19 | |
| 1114 | Y13631 | Clostridium botulinum P-21, P-47 ntnh, bonT genes | 0.18 | |
| 1115 | L24904 | Bombyx mori nuclear polyhedrosis virus hr4R gene. | 0.18 | |
| 1116 | M85049 | Drosophila melanogaster brahma protein mRNA, complete | 0.18 | |
| 1117 | X60777 | Shigella dysenteriae ipabCD genes | 0.17 | |
| 1118 | L42936 | Pseudoxycheila bipustulata mitochondrial large subunit 16S | 0.17 | |
| | | ribosomal RNA (16S rRNA) gene | | |
| 1119 | AE001359 | Chlamydia trachomatis section 86 of 87 of the complete | 0.17 | |
| 1120 | K00899 | yeast(s. cerevisiae) histone 3 gene (h3) fused with e. coli lacz | 0.17 | |
| | | gene and promoter, clone prm115. | | |
| 1121 | M83994 | Staphylococcus aureus prolipoprotein signal peptidase (lsp) | 0.17 | |
| | | gene, complete cds. | | |
| 1122 | Z28050 | S. cerevisiae XI reading frame ORF YKL050c | 0.16 | |
| 1123 | L23971 | Mus musculus fragile X mental retardation syndrome protein | 0.16 | |
| | | (Fmr1) (homologue) mRNA, complete cds. | | |
| 1124 | Z98560 | S. pombe chromosome I cosmid c4C5 | 0.15 | |
| 1125 | U89258 | Oxytricha fallax ‘D, D35E’ type transposase gene, partial cds | 0.15 | |
| 1126 | X62522 | R. norvegicus gene for CNS-myelin proteolipid protein (exon | 0.15 | |
| 1127 | X74504 | M. musculus T10 mRNA | 0.15 | |
| 1128 | D50931 | Human mRNA for KIAA0141 gene, complete cds | 0.15 | |
| 1129 | Z48951 | S. cerevisiae chromosome XVI cosmid 9723 | 0.15 | |
| 1130 | L12395 | Brassica napus small GTP-binding protein (bra) mRNA, | 0.15 | |
| 1131 | U39367 | Blepharoneura manchesteri 16S ribosomal RNA gene, | 0.15 | |
| | | mitochondrial gene encoding mitochondrial RNA, partial | | |
| 1132 | D50357 | Leptocarabus procerulus mitochondrial DNA for NADH | 0.15 | |
| | | dehydrogenase subunit 5, partial cds | | |
| 1133 | L35272 | Glycine max heat shock protein (SB100) complete | 0.15 | |
| 1134 | U63641 | Ligionella pneumophila rpoD operon LporfX, LpdnaG, and | 0.15 | |
| | | LprpoD genes, complete cds | | |
| 1135 | X72186 | H. sapiens C6 gene, exons 10, 11 and 12 | 0.15 | |
| 1136 | D45893 | Neurospora crassa acr-2 DNA, complete cds | 0.15 | |
| 1137 | L47106 | Neurospora crassa kinesin (NKIN) mRNA, complete cds | 0.15 | |
| 1137 | L04457 | Phytophthora megasperma mitochondrial ORF152, complete | 0.15 | |
| | | cds, cytochrome c oxidase subunit I (cox1) gene, complete | | |
| | | cds, cytochrome c oxidase subunit II | | |
| 1139 | L04457 | Phytophthora megasperma mitochondrial ORF152, complete | 0.15 | |
| | | cds, cytochrome c oxidase subunit I (cox1) gene, complete | | |
| | | cds, cytochrome c oxidase subunit II | | |
| 1140 | U12539 | Schizosaccharomyces pombe scd2 (scd2) gene, complete | 0.15 | |
| 1141 | U12539 | Schizosaccharomyces pombe scd2 (scd2) gene, complete | 0.15 | |
| 1142 | AB001901 | Homo sapiens PACE4 gene, exon 4-7 | 0.15 | |
| 1143 | M97550 | Maize sucrose phosphate synthase mRNA, complete cds. > :: | 0.15 | |
| | | emb\|A17878.1\|A17878 Synthetic SPS sequence > | | |
| 1144 | AB001901 | Homo sapiens PACE4 gene, exon 4-7 | 0.15 | |
| 1145 | X07438 | Human DNA for cellular retinol binding protein | 0.14 | |
| 1146 | Z57339 | H. sapiens CpG island DNA genomic Mse1 fragment, clone | 0.14 | |
| | | 171g3, reverse read cpg171g3.rt1a | | |
| 1l47 | X05034 | Rat C2A gene for prostatic binding protein (PBP) | 0.14 | |
| 1148 | U55712 | Human ataxia-telangiectasia (ATM) gene, exon 12 | 0.14 | |
| 1149 | M20273 | Human hepatitis virus type A RNA, complete genome. | 0.14 | |
| 1150 | J01764 | Plasmid pT181, complete genome. | 0.14 | |
| 1151 | X61109 | G. gorilla beta-globingene | 0.14 | |
| 1152 | Z30587 | S. hominis (972) genes for potential ABC transporter and | 0.14 | |
| | | potential membrane spanning protein | | |
| 1153 | U60400 | Babanki virus polymerase nsP4 gene, partial cds virus | 0.14 | |
| | | polymerase nsP4 gene, partial cds | | |
| 1154 | U67478 | Methanococcus jannaschii section 20 of 150 of the complete | 0.14 | |
| 1155 | Z71641 | S. cerevisiae chromosome XIV reading frame ORF | 0.14 | |
| 1156 | X53522 | M. musculus VL1 gene (1G-5) | 0.14 | |
| 1157 | Z21753 | O. tanganicae mitochondrion genes for tRNA-Thr | 0.14 | |
| 1158 | L33841 | Carthamus tinctorius glycerol-3-phosphate acyltransferase | 0.14 | |
| | | mRNA, complete cds. | | |
| 1159 | AF003277 | Glossiphonia complanata cytochrome c oxidase subunit I | 0.14 | |
| | | (COI) gene, partial cds | | |
| 1160 | U89035 | Oxytricha fallax transposon TBE1, insertion fal6, 42 kDa | 0.14 | |
| | | transposase gene, partial cds | | |
| 1161 | L36923 | Streptococcus pneumomae beta-N-acetylhexosaminidase | 0.14 | |
| | | (strH) gene, complete cds | | |
| 1162 | U64830 | Dictyostelium discoideum AX2 protein tyrosine kinase gene, | 0.14 | |
| | | complete cds. | | |
| 1163 | U43082 | Zea mays T cytoplasm male sterility restorer factor 2 (rf2) | 0.14 | |
| | | mRNA, complete cds | | |
| 1164 | Z26492 | T. repens TrMT1A mRNA for metallothionein-like protein | 0.14 | |
| 1165 | X83683 | V. sativa mRNA for early nodulin 40 | 0.14 | |
| 1166 | D63861 | Homo sapiens DNA for cyclophilin 40, complete cds | 0.14 | |
| 1167 | D86594 | Japanese jack bean clone CgHMGY1 DNA for high mobility | 0.14 | |
| | | group protein, complete cds | | |
| 1168 | Z18859 | H. sapiens gene for cone transducin alpha subunit | 0.14 | |
| 1169 | L28038 | Trypanosoma rangeli kinetoplast DNA sequence with | 0.14 | |
| | | conserved sequence blocks | | |
| 1170 | U72057 | Mus musculus chloride channel regulator (Ic1n) gene, exon 1 | 0.14 | |
| 1171 | AF003836 | Mesocricetus auratus isopentenyl diphosphate:dimethylallyl | 0.14 | |
| | | diphosphate isomerase mRNA, complete cds | | |
| 1172 | X78422 | A. thaliana HYP1 mRNA | 0.14 | |
| 1173 | U28042 | Human DEAD box RNA helicase-like protein mRNA, | 0.14 | |
| 1174 | U01070 | Mycoplasma flocculare Ms42 5S rRNA gene. | 0.14 | |
| 1175 | U54776 | Human NTT gene, L1, Alu, and MER 38 repeat regions | 0.14 | |
| 1176 | U40375 | Mus musculus Supt6h mRNA, complete cds | 0.14 | |
| 1177 | X71083 | G. max gene for coproporphyrinogen oxidase | 0.14 | |
| 1178 | D86253 | Human MHC (HLA) DRB intron 1 DNA, partial sequence | 0.14 | |
| 1179 | M55002 | Synechococcus sp. 6-phosphogluconate dehydrogenase | 0.14 | |
| | | gene, complete cds. | | |
| 1180 | X14036 | Tomato cab-7 gene for type II chlorophyll a/b-binding | 0.14 | |
| 1181 | L35272 | Glycine max heat shock protein (SB100) mRNA, complete | 0.14 | |
| 1182 | D50931 | Human mRNA for KIAA0141 gene, complete cds | 0.14 | |
| 1183 | L35272 | Glycine max heat shock protein (SB100) mRNA, complete | 0.14 | |
| 1184 | X05034 | Rat C2A gene for prostatic binding protein (PBP) | 0.14 | |
| 1185 | X89553 | Echovirus 26 DNA for VP2 capsid protein gene | 0.14 | |
| 1186 | Z77656 | Caenorhabditis elegans cosmid F07B10, complete sequence | 0.14 | |
| | | [Caenorhabditis elegans] | | |
| 1187 | Z84739 | H. sapiens flow-sorted chromosome 6 HindIII fragment, | 0.14 | |
| 1188 | L34219 | Homo sapiens retinaldehyde-binding protein (CRALBP) | 0.14 | |
| | | gene, complete cds. | | |
| 1189 | M30168 | D. melanogaster nested repetitive sequences F and G, | 0.14 | |
| 1190 | U07260 | Perissodus microlepis T32a mitochondrion NADH | 0.14 | |
| | | dehydrogenase subunit 2 gene, complete cds | | |
| 1191 | X15308 | H. sapiens NF-H gene,exon 3 | 0.14 | |
| 1192 | J02763 | Human calcyclin gene, complete cds. | 0.14 | |
| 1193 | M76175 | Mouse elongation factor 2 pseudogene, complete cds. | 0.14 | |
| 1194 | X67735 M. musculus mas gene for Mas proto-oncogene | 0.14 | | |
| 1195 | NM_002816.1 | Homo sapiens proteasome (prosome, macropain) 26S | 0.14 | |
| | | subunit, non-ATPase, 12 (PSMD12) mRNA > :: | | |
| | | dbj\|AB003103\|AB003103 Homo sapiens mRNA for 26S | | |
| 1196 | U20754 | Felis catus chromosome D2 mtDNA tandem repeat Numt | 0.14 | |
| 1197 | L00727 | Human myotonin protein kianse (Mt-PK) gene, complete | 0.14 | |
| | | cds. > :: gb\|I25678\|I25678 Sequence 10 from U.S. Pat. No. | | |
| 1198 | M57750 | S. pombe cut2+ gene, complete cds. | 0.14 | |
| 1199 | X03000 | Adenovirus type7 genome left end (0.0 to 31%) | 0.14 | |
| 1200 | NM_002911.1 | Homo sapiens regulator of nonsense transcripts 1 (RENT1) | 0.14 | |
| | | mRNA > :: gb\|U65533\|HSU65533 Human regulator of | | |
| | | nonsense transcript stability (RENT1) mRNA, complete cds | | |
| 1201 | Z71367 | S. cerevisiae chromosome XIV reading frame ORF | 0.14 | |
| 1202 | J04809 | Human cytosolic adenylate kinase (AK1) gene, complete | 0.14 | |
| 1203 | X75014 | M. musculus Phox2 ruRNA for homeodomain protein | 0.14 | |
| 1204 | Y12259 | R. norvegicus mRNA for Kir3.1 protein | 0.14 | |
| 1205 | X81981 | L. helveticus plasmid pLH2 DNK (4 ORFs) | 0.14 | |
| 1206 | AB001901 | Homo sapiens PACE4 gene, exon 4-7 | 0.14 | |
| 1207 | D38548 | Human mRNA for KIAA0076 gene, complete cds | 0.14 | |
| 1208 | X64273 | Herpesvirus saimiri gene 15 > :: gb\|I41338\|I41338 Sequence | 0.13 | |
| | | from U.S. Pat. No. 5624837 > :: gb\|I49086\|I49086 Sequence | | |
| | | 9 from U.S. Pat. No. 5627264 | | |
| 1209 | Z92779 | Caenorhabditis elegans cosmid C44E1, complete sequence | 0.13 | |
| | | [Caenorhabditis elegans] | | |
| 1210 | X14384 | Astasia longa chioroplast rp15 gene for ribosomal protein L5 | 0.13 | |
| 1211 | M97880 | Bacillus thuringiensis cryIC-related gene sequence. > :: | 0.13 | |
| | | gb\|I82521\|I82521 Sequence 1 from U.S. Pat. No. 5712248 > :: | | |
| | | gb\|I93759\|I93759 Sequence 1 from U.S. Pat. No. 5731194 | | |
| 1212 | X58049 | H. sapiens DNA for ferredoxin repeat region | 0.13 | |
| 1213 | U47542 | Vibrio cholerae ADP-L-glycero-D-mannoheptose-6- | 0.13 | |
| | | epimerase (rfaD) gene, complete cds. | | |
| 1214 | M90758 | Sheep (clone C5-2) MHC class II cell surface glycoprotein | 0.13 | |
| | | OLA-DRB (OLA-DRB) pseudogene, exon 4. > :: | | |
| | | gb\|S83918\|S83914S3 DRB = MHC class II b {pseudogene} | | |
| 1215 | U67478 | Methanococcus jannaschii section 20 of 150 of the complete | 0.13 | |
| 1216 | U90889 | Mus musculus transketolase (TKT) gene, partial cds | 0.13 | |
| 1217 | K03273 | C. elegans heat shock protein genes (hsp16-48 and hsp16-1), | 0.13 | |
| | | complete cds. | | |
| 1218 | D90736 | Escherichia coli genomic DNA. (22.6 -23.0 min) | 0.13 | |
| 1219 | X63546 | H. sapiens mRNA for tre oncogene (clone 210) | 0.13 | |
| 1220 | L16770 | Anas platyrhynchos mitochondrial complete transfer RNA- | 0.13 | |
| | | Glu, transfer RNA-Phe, transfer RNA-Val, transfer RNA- | | |
| | | Leu, 12S ribosomal RNA, and 16S ribosomal RNA genes | | |
| 1221 | U94410 | Dictyostelium discoideum plasmid Ddp6 Rep protein | 0.13 | |
| 1222 | AC001083 | Homo sapiens (subclone 2_a6 from BAG H75) DNA | 0.13 | |
| 1223 | Z96048 | Caenorhabditis elegans cosmid F57A10, complete sequence | 0.13 | |
| | | [Caenorhabditis elegans] | | |
| 1224 | M92914 | Drosophila virilis mastermind gene, complete cds | 0.13 | |
| 1225 | Z82961 | Drosophila virilis mastermind gene, complete cds | 0.13 | |
| 1226 | U66535 | Human beta4-integrin (ITGB4) gene, exons | 0.13 | |
| 1227 | NM_001432.1 | Homo sapiens epiregulin (EREG) mRNA > :: | 0.13 | |
| | | dbj\|D30783\|D30783 Homo sapiens mRNA for epiregulin, | | |
| 1228 | X96468 | P. tetraurelia gamma1-51D immobilisation antigen gene, 3′ | 0.13 | |
| | | coding and non-coding region | | |
| 1229 | X05918 | Kluyveromyces fragilis beta-glucosidase gene | 0.13 | |
| 1230 | Z48243 | A. thaliana PARP mRNA for PARP protein | 0.13 | |
| 1231 | X56276 | Human Hut 2 End gene | 0.13 | |
| 1232 | X55318 | Mus musculus Hox-3.2 gene | 0.13 | |
| 1233 | U90009 | Phalacrocorax pelagicus cytochrome b gene, mitochondrial | 0.13 | |
| | | gene encoding mitochondrial protein, partial cds | | |
| 1234 | L76571 | Homo sapiens nuclear hormone receptor (shp) gene, 3′ end | 0.13 | |
| 1235 | U60581 | Human c-jun gene, promoter region with flanking | 0.13 | |
| | | evolutionary conserved sequences | | |
| 1236 | Z26886 | B. mori gene for Nd-sD mutant fibroin light chain | 0.13 | |
| 1237 | L19740 | Canis familiaris Kv1.2 delayed rectifier K+ channel mRNA, | 0.13 | |
| | | complete cds | | |
| 1238 | U26948 | Glycine max ribosomal protein S16 (rps 16) gene, partial cds, | 0.13 | |
| | | beta-carboxyltransferase (accD), photosystem I component | | |
| | | (psaI), ORE 202 protein (ORF 203), ORF 151 protein (ORF | | |
| | | 151), ORF 103 protein (ORF 103), ORF 229 precurso . . . | | |
| 1239 | U48288 | Rattits norvegicus A-kinase anchoring protein AKAP 220 | 0.13 | |
| | | mRNA, complete cds | | |
| 1240 | X70064 | P. deltoides gene for poplar bark storage protein | 0.13 | |
| 1241 | L22857 | Colletotrichum gloeosporioides pectin lyase (pn1A) gene, | 0.13 | |
| 1242 | X75607 | P. halophilus RepA and RepB genes | 0.13 | |
| 1243 | X82584 | M. musculus mRNA for immunoglobulin heavy chain, V | 0.13 | |
| 1244 | M76713 | Spodoptera frugiperda 16S rRNA gene, Val-tRNA, and Leu- | 0.13 | |
| | | tRNA genes, and ND-1 protein gene, 5′ end. | | |
| 1245 | X57075 | H. sapiens FGF6 gene | 0.13 | |
| 1246 | Z17201 | H. sapiens (DXS1003) DNA segment containing | 0.13 | |
| 1247 | D50931 | Human mRNA for KIAA0141 gene, complete cds | 0.13 | |
| 1248 | D80002 | Human mRNA for KIAA0180 gene, partial cds | 0.13 | |
| 1249 | M58600 | Human heparin cofactor II (HCF2) gene, exons 1 through 5. | 0.13 | |
| 1250 | Z79998 | Human DNA sequence from cosmid B5E3 on chromosome | 0.13 | |
| | | 22 Contains CpG island, EST | | |
| 1251 | X82868 | G. gallus microsatellite DNA (63G2) | 0.13 | |
| 1252 | AF009074 | Hepatitis C virus genomic RNA, 3′ nonstranslated region, | 0.13 | |
| | | partial sequence. clone #19 | | |
| 1253 | M26716 | Rat cAMP phosphodiesterase mRNA, complete cds., clone | 0.13 | |
| 1254 | Z57339 | H. sapiens CpG island DNA genomic Mse1 fragment, clone | 0.13 | |
| | | 171g3, reverse read cpg171g3.rt1a | | |
| 1255 | U76524 | Sambucus nigra ribosome inactivating protein precursor | 0.13 | |
| | | mRNA, complete cds | | |
| 1256 | AF000582 | Mus musculus nuclear receptor coactivator protein 2 mRNA, | 0.13 | |
| | | complete cds | | |
| 1257 | D12917 | Yeast gene for a component of the pheromone signal | 0.13 | |
| | | transduction pathway, complete cds | | |
| 1258 | X70326 | H. sapiens MacMarcks mRNA | 0.13 | |
| 1259 | X82237 | S. chinensis RAPD DNA (523 bp) | 0.13 | |
| 1260 | U10116 | Human superoxide dismutase (SOD3) gene, complete cds. | 0.13 | |
| 1261 | X73293 | M. vannielii genes rpoH, rpoB and rpoA | 0.13 | |
| 1262 | U01766 | Mycoplasma genitalium major adhesion protein MgPa gene, | 0.13 | |
| | | partial cds | | |
| 1263 | X79706 | C. aietinum capr1 mRNA for pathogenesis-related protein | 0.13 | |
| 1264 | U45957 | Nicotiana alata SA2-RNase precursor gene, complete cds. | 0.13 | |
| 1265 | X66313 | H. sapiens GLUDP2 gene (exon 2) | 0.13 | |
| 1266 | X07946 | Yeast plasmid DNA coding for RNA polymerase subunit | 0.13 | |
| 1267 | X07870 | Drosophila melanogaster bicoid gene bcd | 0.13 | |
| 1268 | X15308 | H. sapiens NF-H gene, exon 3 | 0.13 | |
| 1269 | Z22551 | H. sapiens kinectin gene | 0.13 | |
| 1270 | X89398 | H. sapiens ung gene for uracil DNA-glycosylase | 0.13 | |
| 1271 | D10654 | S. coelicolor afsQ1 and afsQ2 genes | 0.13 | |
| 1272 | U10516 | Human DNA polymerase beta gene, exons 1 and 2 | 0.13 | |
| 1273 | X57075 | H. sapiens FGF6 gene | 0.13 | |
| 1274 | U71193 | Mus musculus Rp123 matrix-attachment region | 0.13 | |
| 1275 | X69908 | H. sapiens gene for mitochondrial ATP synthase c subunit | 0.13 | |
| 1277 | X78401 | Bacteriophage P22 fight operon, orf 48, replication genes 18 | 0.13 | |
| | | and 12, nin region genes, ninG phosphatase, late control | | |
| | | gene 23, orf60, complete cds, late control region, start of | | |
| 1278 | X78401 | Bacteriophage P22 right operon, orf 48, replication genes 18 | 0.13 | |
| | | and 12, nin region genes, ninG phosphatase, late control | | |
| | | gene 23, orf 60, complete cds, late control region, start of | | |
| 1279 | Y09852 | H. sapiens FGFR3 gene, partial | 0.13 | |
| 1280 | Z71367 | S. cerevisiae chromosome XIV reading frame ORF | 0.13 | |
| 1281 | U38292 | Human microtubule-associated protein 1a(MAP1A) mRNA, | 0.13 | |
| | | complete cds | | |
| 1282 | Z71367 | S. cerevisiae chromosome XIV reading frame ORF | 0.13 | |
| 1283 | Z71367 | S. cerevisiae chromosome XIV reading frame ORF | 0.13 | |
| 1284 | M87623 | Babesia bovis variable antigen 1 mRNA 5′ end. | 0.13 | |
| 1285 | M91452 | Sus scrofa ryanodine receptor (RYR1) gene, complete cds. | 0.13 | |
| 1286 | M91452 | Sus scrofa ryanodine receptor (RYR1) gene, complete cds. | 0.13 | |
| 1287 | M87623 | Babesia bovis variable antigen 1 mRNA, 5′ end. | 0.13 | |
| 1288 | X96616 | P. primaurelia gene encoding 156D surface antigen | 0.13 | |
| 1289 | Z33222 | M. capricolum DNA for CONTIG MC303 | 0.12 | |
| 1290 | X52626 | Phaseolus vulgaris gene for alpha-phaseolin | 0.12 | |
| 1291 | L32699 | Paracentrotus lividus glutamine synthetase (Gs) mRNA, | 0.12 | |
| 1292 | M63669 | Dog arginine esterase gene, complete cds. | 0.12 | |
| 1293 | X75653 | A. longa plastid genes for ribosomal proteins and tRNAs | 0.12 | |
| 1294 | Z11839 | T. maritima nusG gene and genes for ribosomal proteins | 0.12 | |
| 1295 | AB005744 | Perilla frutescens DNA for 1-limonene synthase, complete | 0.12 | |
| 1296 | X84904 | Plasmodium falciparum encoding Pfg27/25 | 0.12 | |
| 1297 | L02074 | Drosophila melanogaster ribosomal protein S6 gene and two | 0.12 | |
| | | potential alternatively spliced proteins, complete cds | | |
| 1298 | Z84812 | Human DNA sequence from phage pTEL from a contig from | 0.12 | |
| | | the tip of the short arm of chromosome 16, spanning 2 Mb of | | |
| | | 16p13.13 Contains ESTs | | |
| 1299 | X95276 | P. falciparum complete gene map of plastid-like DNA | 0.12 | |
| 1300 | NM_001432.1 | Homo sapiens epiregulin (EREG) mRNA > :: | 0.12 | |
| | | dbj\|D30783\|D30783 | Homo sapiens mRNA for epiregulin, | |
| 1301 | X84726 | M. musculus neurocan gene | 0.12 | |
| 1302 | Z35810 | S. cerevisiae chromosome II reading frame ORF YBL049w | 0.12 | |
| 1303 | L01655 | Plasmodium falciparum T9/106 triosephosphate isomerase | 0.12 | |
| 1304 | U36796 | Mus musculus presynaptic protein SNAP-25 (Snap-25) gene, | 0.12 | |
| 1305 | U22361 | Saccharomyces cerevisiae Rlr1p (RLR1) gene, complete cds. | 0.12 | |
| 1306 | L04161 | Plasmodium falciparum (clone Pfg377 [PfsXLX]) DNA | 0.12 | |
| | | sequence, complete cds | | |
| 1307 | U32768 | Haemophilus influenzae Rd section 83 of 163 of the | 0.12 | |
| 1308 | D28808 | Mycoplasma capricolum mt1A and gyrB genes for DNA | 0.12 | |
| | | gyrase subunit B and mannitol-specific phosphotransferase | | |
| 1309 | L05920 | Human constitutively expressed serum amyloid A protein | 0.12 | |
| | | (SAA4) gene, exons 1 through 4. | | |
| 1310 | M96642 | Paramecium tetraurelia P126 repetitive element. | 0.12 | |
| 1311 | L81724 | Homo sapiens (subclone 2_a3 from P1 H69) DNA sequence | 0.12 | |
| 1312 | AF010331 | Tenebrio molitor thermal hysteresis protein isoform YL-3 | 0.12 | |
| | | precursor, mRNA, complete cds | | |
| 1313 | U74496 | Human chromosome 4q35 subtelomeric sequence | 0.12 | |
| 1314 | U17295 | Haemophilus influenzae dppB, dppC, dppD, dppF, isn, artP | 0.12 | |
| | | artI/J, artQ, and artM genes, complete cds, and opa gene, | | |
| 1315 | X53921 | A. thaliana T-DNA insertion genomic target sequence 621- | 0.12 | |
| 1316 | X75653 | A. longa plastid genes for ribosomal proteins and tRNAs | 0.12 | |
| 1317 | U09347 | Human variant urokinase plasminogen activator receptor | 0.12 | |
| | | (uPAR2) mRNA, partial cds. | | |
| 1318 | S83182 | hyaluronan-binding protein = hepatocyte growth factor | 0.12 | |
| | | activator homolog [human, plasma, mRNA, 2408 nt] | | |
| 1319 | U21164 | Human dopamine D5 receptor gene, 5′ flanking and | 0.12 | |
| 1320 | AF022391 | Feline herpesvirus 1 immediate early protein, glycoprotein | 0.12 | |
| | | gL, and uracil DNA glycosylase genes, complete cds | | |
| 1321 | M74569 | Clostridium acetobutylicum heat shock protein | 0.12 | |
| 1322 | X15359 | Drosophila virilis hunchback (hb) gene for zinc-finger | 0.12 | |
| | | protein transcription factor | | |
| 1323 | U67478 | Methanococcus jannaschii section 20 of 150 of the complete | 0.12 | |
| 1324 | X77052 | Entomopoxvirus gene for spherulin | 0.12 | |
| 1325 | M97514 | Saccharomyces douglasii mitochondrial cytochrome c | 0.12 | |
| | | oxidase subunit I (COXI) gene, complete cds | | |
| 1326 | X56495 | H. sapiens DNA for the upstream regulatory region of the c- | 0.12 | |
| | | erbB2 gene | | |
| 1327 | D61398 | Human MSH3 gene, exon3 | 0.12 | |
| 1328 | Z81595 | Caenorhabditis elegans cosmid T22H2, complete sequence | 0.12 | |
| | | [Caenorhabditis elegans] | | |
| 1329 | D61398 | Human MSH3 gene, exon3 | 0.12 | |
| 1330 | Z79998 | Human DNA sequence from cosmid B5E3 on chromosome | 0.12 | |
| | | 22 Contains CpG island, EST | | |
| 1331 | NM_001280.1 | Homo sapiens cold inducible RNA-binding protein (CIRBP) | 0.12 | |
| | | mRNA > :: dbj\|D78134\|HUMCIRPA Homo sapiens mRNA | | |
| 1332 | Z49867 | Caenorhabditis elegans cosmid C33D3, complete sequence | 0.12 | |
| | | [Caenorhabditis elegans] | | |
| 1333 | X14036 | Tomato cab-7 gene for type II chlorophyll a/b-bin | 0.12 | |
| 1334 | AF012899 | Sambucus nigra ribosome inactivating protein precursor | 0.12 | |
| | | mRNA, complete cds | | |
| 1335 | U19159 | Human P protein (P) gene, exon 8 | 0.12 | |
| 1336 | X74987 | H. sapiens mRNA for 2′-5′ oligoadenylate binding protein > | 0.12 | |
| | | :: gb\|L24115\|HUMAAZ Human DNA fragment. > :: | | |
| | | emb\|A49723.1\|A49723 Sequence 2 from Patent | | |
| 1337 | U32112 | Dictyostelium discoideum 34 kDa actin binding protein | 0.12 | |
| | | gene, complete cds > :: emb\|Z50156\|DD30KDABP | | |
| | | D. discoideum gene for 34 kD actin binding protein | | |
| 1338 | M55002 | Synechococcus sp. 6-phosphogluconate dehydrogenase | 0.12 | |
| | | gene, complete cds. | | |
| 1339 | AF019225 | Homo sapiens apolipoprotein L mRNA, complete cds | 0.12 | |
| 1340 | U14190 | Mycobacterium smegmatis diptheria toxin repressor | 0.12 | |
| | | homolog (dtxR) gene, complete cds. | | |
| 1341 | J05276 | Rat 5-hydroxytryptamine-1a receptor (5-HT-1a) gene, | 0.12 | |
| 1342 | AE000603.1 | Helicobacter pylon 26695 section 81 of 134 of the complete | 0.12 | |
| 1343 | X15308 | H. sapiens NF-H gene, exon 3 | 0.12 | |
| 1344 | L35600 | Homo sapiens DNA sequence. | 0.12 | |
| 1345 | Z73360 | Human DNA sequence from cosmid 92M18, BRCA2 gene | 0.12 | |
| | | region chromosome 13q12-13 | | |
| 1346 | U93721 | Homo sapiens green cone photoreceptor pigment gene, 5′ | 0.12 | |
| | | flanking region | | |
| 1347 | X78401 | Bacteriophage P22 tight operon, orf 48, replication genes 18 | 0.12 | |
| | | and 12, nin region genes, ninG phosphatase, late control | | |
| | | gene 23, orf 60, complete cds, late control region, start of | | |
| 1348 | Z71367 | S. cerevisiae chromosome XIV reading frame ORF | 0.12 | |
| 1349 | U43673 | Mus musculus putative transmembrane receptor IL-1Rrp | 0.12 | |
| | | mRNA, complete cds > :: gb\|AR016448\|AR016448 | | |
| | | Sequence 3 from U.S. Pat. No. 5776731 | | |
| 1350 | X72863 | A. thaliana TMKL1 mRNA | 0.12 | |
| 1351 | U13769 | Vibrio sp. ppGpp synthetase I (relA) gene, complete cds. | 0.12 | |
| 1352 | M32732 | Chicken progesterone receptor gene, encoding forms A and | 0.11 | |
| 1353 | X04668 | Xenopus laevis XK81A1 keratin gene > :: | | |
| | | emb\|X04804\|XLXK81A1 Xenopus laevis DNA for stage- | | |
| | | specific epidermal type I keratin A1 (embryo- and larval- | | |
| 1354 | Z82197 | Human DNA sequence from PAC 293L6 on chromosome | 0.11 | |
| | | 22, complete sequence [Homo sapiens] | | |
| 1355 | M84214 | Cucumis sativus ORF 1, chintinase, and ORF 3 genes, | 0.11 | |
| | | complete cds > :: gb\|I38466\|I38466 Sequence 36 from U.S Pat. | | |
| | | No. 5614395 > :: gb\|I56941 \|I56941 Sequence 36 from U.S. Pat. | | |
| | | No. 5650505 > :: gb\|I59807\|I59807 Sequence 36 from U.S. Pat. | | |
| | | No. 5654414 > :: gb\|I75134\|I7513 | | |
| 1356 | Y08503 | F. domesticus mitochondrial 12S rRNA gene | 0.11 | |
| 1357 | L03286 | Hamster P-glycoprotein class I (pgp1) gene exons 1-2. | 0.11 | |
| 1358 | X57171 | D. caryophyllus CARSR12 gene | 0.11 | |
| 1359 | L07307 | Mus musculus ATPase mRNA-ampifying genomic DNA | 0.11 | |
| | | MOR6.5 sequence. > :: gb\|S55685\|S55685 | | |
| | | MOR6.5 = ouabain resistance gene {repeat sequence} [mice, | | |
| 1360 | Z22175 | Caenorhabditis elegans cosmid K01F9, complete sequence | 0.1 | |
| | | [Caenorhabditis elegans] | | |
| 1361 | Z11839 | T. maritima nusG gene and genes for ribosomal proteins | 0.1 | |
| 1362 | L36857 | Pisum sativum GTP-binding protein (IAP86) mRNA, | 0.096 | |
| 1363 | AF000994 | Homo sapiens ubiquitous TPR motif, Y isoform | 0.07 | |
| 1364 | U61950 | Caenorhabditis elegans cosmid C45E5 | 0.069 | |
| 1365 | U32446 | Mus musculus putative breast/ovarian cancer susceptibility | 0.068 | |
| | | protein homolog (Brca1) mRNA, complete cds. | | |
| 1366 | AB001914 | Homo sapiens PACE4 gene, exon 23-25, complete cds | 0.068 | |
| 1367 | L20934 | Anopheles gambiae complete mitochondrial genome | 0.066 | |
| 1368 | AJ001700 | Mus musculus mRNA for neuroserpin | 0.065 | |
| 1369 | AJ001700 | Mus musculus mRNA for neuroserpin | 0.065 | |
| 1370 | AF106932 | Drosophila melanogaster plexin A (plexA) mRNA, complete | 0.065 | |
| 1371 | D82813 | Populus kitakamiensis cyp73b gene for cinnamic acid 4- | 0.065 | |
| | | hydroxylase, partial cds | | |
| 1372 | V01087 | Hemagglutinin gene of influenza virus strain | 0.065 | |
| 1373 | AE001178 | Borrelia burgdorferi (section 64 of 70) of the complete | 0.064 | |
| 1374 | X80199 | H. sapiens MLN51 mRNA | 0.064 | |
| 1375 | AF042384 | Homo sapiens BC-2 protein mRNA, complete cds | 0.064 | |
| 1376 | AJ223485 | Enoploteuthis higginsi mitochondrial 16S rRNA | 0.063 | |
| 1377 | AF086094 | Homo sapiens full length insert cDNA clone YZ87H06 | 0.061 | |
| 1378 | AF017027 | African swine fever virus lectin homolog (8CR) gene, | 0.061 | |
| 1379 | U56084 | Bordetella bronchiseptica electron transfer flavoprotein | 0.06 | |
| | | alpha subunit (etfA) gene, partial cds, and exogenous ferric | | |
| | | sideerophore receptor (bfrA) gene, complete cds | | |
| 1380 | M33387 | Human debrisoquine 4-hydroxylase (CYP2D8P) and | 0.057 | |
| 1381 | M25315 | Homo sapiens (clone pAT 464) potential | 0.057 | |
| | | lymphokine/cytokine mRNA, complete cds. | | |
| 1382 | AB011121 | Homo sapiens mRNA for KIAA0549 protein, partial cds | 0.055 | |
| 1383 | NM_002647.1 | Homo sapiens phosphatidylinositol 3-kinase, class 3 | 0.051 | |
| | | (PIK3C3) mRNA > :: emb\|Z46973\|HSPITR1 H. sapiens | | |
| | | mRNA for phosphatidylinositol 3-kinase | | |
| 1384 | Z18274 | Homo sapiens satellite DNA | 0.05 | |
| 1385 | L25941 | Homo sapiens integral nuclear envelope inner membrane | 0.049 | |
| | | protein (LBR) gene, complete cds. | | |
| 1386 | U28171 | Trypanosoma cruzi kinetoplast putative maxicircle divergent | 0.049 | |
| 1387 | X76168 | R. norvegicus mRNA for connexin 30.3 | | |
| 1388 | L34345 | Morganella morganii xylitol repressor, complete cds; xylitol | 0.049 | |
| | | dehydrogenase, complete cds; xylulokinase, 5′ end. | | |
| 1389 | K01322 | Human Ig germline kappa L-chain V-region gene germline | 0.049 | |
| | | kappa L-chain V-region gene (HK189), V-kappa-1. | | |
| 1390 | S72468 | capsid protein {RNA} [tomato aspermy virus TAV-B, | 0.049 | |
| | | Blencowe, Genomic RNA, 2213 nt] | | |
| 1391 | L08426 | Zea mays auxin-binding protein (abp4) gene, exons 1-5 and | 0.048 | |
| | | complete cds. | | |
| 1392 | X96972 | D. buzzatii copia element DNA | 0.048 | |
| 1393 | X17147 | Canine mRNA for thyrotropin (TSH) receptor variant | 0.048 | |
| 1394 | L13164 | Saccharomyces cerevisiae k9 killer toxin resistant | 0.047 | |
| 1395 | X66451 | E. octocarinatus RPA2 gene for RNA polymerase I second | 0.047 | |
| | | largest subunit | | |
| 1396 | X75426 | G. biloba (developing endosperm) ginnacin mRNA | 0.047 | |
| 1397 | M95171 | Aedes aegypti LINE Juan-A including DNA | 0.047 | |
| | | binding protein and reverse transcriptase-like protein | | |
| | | mRNA, complete coding regions. | | |
| 1398 | Z49076 | R. prowazekii gene (unknown) | 0.047 | |
| 1399 | K01323 | Human Ig germline kappa L-chain V-region gene germline | 0.047 | |
| | | immunoglobulin heavy chain, kappa chain, | | |
| 1400 | L48713 | Homo sapiens galactose-1-phosphate uridyl transferase | 0.047 | |
| | | (GALT) mutant V44L gene, exon 7 (M96246 bases 303- | | |
| 1401 | U77310 | Drosophila melanogaster porcupine mRNA, complete cds | 0.047 | |
| 1402 | J01323 | Yeast (S. cerevisiae) enolase gene (clone peno8) and flanks. | 0.047 | |
| 1403 | L14321 | Bovine herpesvirus type 1 immedidate-early transcriptional | 0.047 | |
| | | control protein (BICP4) gene, 5′ end. | | |
| 1404 | L19266 | Homo sapiens myotonic dystrophy-associated protein kinase | 0.047 | |
| | | and 59 genes. | | |
| 1405 | M58600 | Human heparin cofactor II (HCF2) gene, exons 1 through 5. | 0.046 | |
| 1406 | D86964 | Human mRNA for KIAA0209 gene, partial cds | 0.046 | |
| 1408 | L27331 | Glyphinaphis bambusae mitochondrial cytochrome oxidase | 0.046 | |
| | | subunit I gene, 3′ end, and cytochrome oxidase subunit II | | |
| 1409 | U57613 | Human interleukin-2 receptor alpha chain (IL2RA) gene, | 0.046 | |
| | | promoter region | | |
| 1410 | U24088 | Solanum tuberosum sucrose synthase clone gPOSS65, | 0.046 | |
| | | complete cds. | | |
| 1411 | V01087 | Hemagglutinin gene of influenza virus strain | 0.046 | |
| 1412 | S76792 | OX40 = cell surface antigen [human, mRNA Partial, 1034 nt] | 0.046 | |
| 1413 | U72396 | Lycopersicon esculentum class II small heat shock protein | 0.046 | |
| | | Le-HSP17.6 mRNA, complete cds | | |
| 1414 | U51677 | Human non-histone chromatin protein HMG1 (HMG1) gene, | 0.046 | |
| | | complete cds | | |
| 1415 | X98743 | H. sapiens mRNA for RNA helicase (Myc-regulated dead | 0.046 | |
| 1416 | M63868 | C. hircus alpha-lactalbumin gene, exons 1-4. | 0.046 | |
| 1417 | Z92970 | Caenorhabditis elegans cosmid H06O01, complete sequence | 0.045 | |
| | | [Caenorhabditis elegans] | | |
| 1418 | M29482 | Human leukocyte adhesion protein p150, 95 alpha subunit | 0.045 | |
| | | gene, exons 2-6. | | |
| 1419 | Z78942 | H. sapeins flow-sorted chromosome 6 HindIII fragment, | 0.045 | |
| 1420 | L06863 | Cricetulus griseus collagen mRNA, 3′ end. | 0.045 | |
| 1421 | X86449 | E. caballus DNA segment containing microsatellite | 0.045 | |
| 1422 | U32446 | Mus musculus putative breast/ovarian cancer susceptibility | 0.045 | |
| | | protein homolog (Brca1) mRNA, complete cds. | | |
| 1423 | K01323 | Human Ig germime kappa L-chain V-region gene germline | 0.045 | |
| | | immunoglobulin heavy chain, kappa chain, | | |
| 1424 | M13555 | Human Ia-associated invariant gamma-chain gene, exon 1 | 0.045 | |
| | | clones lambda-y(1, 2, 3). | | |
| 1425 | U68562 | Rattus norvegicus chaperonin 60 (Hsp60) and chaperonin 10 | 0.045 | |
| | | (CPN10) genes, nuclear genes encoding mitochondrial | | |
| 1426 | AB003286 | Homo sapiens DNA for choline kinase like protein and | 0.045 | |
| | | muscle type carnitine palmitoyltransferase I, partial and | | |
| 1427 | U34372 | Human tyrosine kinase TXK (txk) gene, exon 6. | 0.045 | |
| 1428 | U51677 | Human non-histone chromatin protein HMG1 (HMG1) gene, | 0.045 | |
| | | complete cds | | |
| 1429 | U23476 | Dictyostelium discoideum phosphatidylinositol-4,5- | 0.045 | |
| | | diphosphate 3-kinase (PIK1) mRNA, complete cds. | | |
| 1430 | Z98975 | S. pombe chromosome I cosmid c19E9 | 0.044 | |
| 1431 | X16465 | Trypanosoma brucei mRNA for cysteine proteinase | 0.044 | |
| 1432 | D85274 | Macaca fascicularis mitochondrial DNA for NADH | 0.044 | |
| | | dehydrogenase subunit 4, subunit 5, partial cds | | |
| 1433 | X16876 | Soybean ENOD2B gene for Ngm-75 | 0.044 | |
| 1434 | U19755 | Mus domesticus thyroid transcription factor 1 gene, | 0.044 | |
| 1435 | L77700 | Gallus gallus 18C15 mRNA, complete cds. | 0.044 | |
| 1436 | AF019981 | Dictyostelium discoideum HelE (helE) gene, partial cds | 0.044 | |
| 1437 | L13469 | Saccharomyces cerevisiae antivirual protein Ski2p | 0.044 | |
| 1438 | M26238 | D. discoideum spore coat protein SP70 gene, complete cds. | 0.044 | |
| 1439 | U65391 | Lycoperisicon esculentum PRF (Prf) gene, complete cds | 0.044 | |
| 1440 | AF000582 | Mus musculus nuclear receptor coactivator protein 2 mRNA, | 0.044 | |
| | | complete cds | | |
| 1441 | X98880 | C. albicans ARG5, 6 gene | 0.044 | |
| 1442 | D89609 | Oryzias latipes mRNA for choriogenin H, complete cds | 0.044 | |
| 1443 | Y13544 | Homo sapiens cosmid C1 | 0.044 | |
| 1444 | Y14952 | Mus musculus gene encoding immunoglobulin J chain | 0.043 | |
| 1445 | Z69660 | Caenorhabditis elegans cosmid F39B1, complete sequence | 0.043 | |
| | | [Caenorhabditis elegans] | | |
| 1446 | X53404 | Glycine max glycinin A(1a)B(1b) and A(2)B(1a) boundary | 0.043 | |
| 1447 | U48271 | Dictyostelium discoideum UbpA deubiquitinase mRNA, | 0.043 | |
| 1448 | U24187 | Saccharomyces cerevisiae origin recognition complex, | 0.043 | |
| | | subunit 5 (ORC5) gene, complete cds > :: gb\|I32734\|I32734 | | |
| | | Sequence 9 from U.S. Pat. No. 5589341 > :: gb\|I38710\|I38710 | | |
| | | Sequence 9 from U.S. Pat. No. 5614618 | | |
| 1449 | Z28177 | S. cerevisiae chromosome XI reading frame ORF YKL178c | 0.043 | |
| 1450 | X05951 | Drosophila melanogaster calmodulin gene exon 4 and intron | 0.043 | |
| | | III (partial) | | |
| 1451 | L12999 | Daltonia sp. mitochondrial 16S ribosomal RNA | 0.043 | |
| 1452 | U68098 | Human poly(A)-binding protein (PABP) gene, exons 6 and 7 | 0.043 | |
| 1453 | US5774 | Caenorhabditis elegans cosmid F35G8. | 0.043 | |
| 1454 | Z46941 | H. sapiens DNA for alu repeats | 0.043 | |
| 1455 | U41747 | Caenorhabditis elegans cosmid ZK1131. | 0.043 | |
| 1456 | M30168 | D. melanogaster repetitive sequences F and G, | 0.043 | |
| 1457 | U05350 | Human immunodeficiency virus type 2 isolate HIV2CBL21 | 0.042 | |
| | | gp160 envelope (env) gene, complete cds. | | |
| 1458 | U44129 | Rattus norvegicus p58 mRNA, complete cds | 0.042 | |
| 1459 | L13377 | Staphylococcus aureus enterotoxin gene, 3′ end. | 0.042 | |
| 1460 | X83758 | P. falciparum topoisomerase I gene | 0.042 | |
| 1461 | U64896 | Anagrapha falcifera nuclear polyhedrosis virus protein- | 0.042 | |
| | | typrosine phosphatase, lef-2, polyhedrin, vp78 and protein | | |
| | | kinase genes, complete cds | | |
| 1462 | J02175 | Influenza A/wsn/33 (h1n1). defective interfering 13, cdna. | 0.042 | |
| 1463 | D86608 | Arabidopsis thaliana DNA for inorganic phosphate | 0.042 | |
| | | transporter, complete cds | | |
| 1464 | M93716 | Pan paniscus DNA fragment. | 0.042 | |
| 1465 | X14385 | Astasia longa chloroplast rps7 and tufA genes for ribosomal | 0.042 | |
| | | protein S7 and elongation factor Tu respectively | | |
| 1466 | M74069 | Saccharomyces cerevisiae endochitinase (CTS1-1) gene, | 0.042 | |
| | | complete cds. | | |
| 1467 | M73257 | C. parasitica laccase (lac-1) gene, complete cds. | 0.042 | |
| 1468 | M31126 | Human pregnancy-specific bet-1-glycoprotein (SP1) | 0.042 | |
| | | mRNA, complete cds, clone hPS2. | | |
| 1469 | U70826 | Fundulus heteroclitus vitellogenin II precursor mRNA, | 0.041 | |
| 1470 | AF000299 | Caenorhabditis elegans cosmid E03H12 | 0.041 | |
| 1471 | X83390 | Albinaria coerulea complete mithochondria DNA | 0.041 | |
| 1472 | L12582 | Human ornithine decarboxylase (ODC) gene, 5′ flanking | 0.041 | |
| 1473 | D89655 | Rattus norvegicus mRNA for scavenger receptor class B | 0.041 | |
| | | complete cds | | |
| 1474 | Z23267 | P. anserina AS1 gene, complete CDS | 0.041 | |
| 1475 | M63868 | C. hircus alpha-lactalbumin gene, exons 1-4. | 0.041 | |
| 1476 | U56440 | Human His-1 gene sequence | 0.04 | |
| 1477 | L06863 | Cricetulus griseus type VII collagen mRNA, 3′ end. | 0.04 | |
| 1478 | U02928 | Dictyostelium discoideum Ax3 Rab7 mRNA, complete cds. | 0.04 | |
| 1479 | M19828 | Human apolipoprotein B-100 (apoB) gene, exons 22 through | 0.04 | |
| 1480 | M34434 | Human angiotensin-converting enzyme (ACE) gene, 5′ end. | 0.04 | |
| 1481 | Z68884 | Human DNA sequence from cosmid L21F12, Huntington's | 0.04 | |
| | | Disease Region, chromosome 4p16.3 | | |
| 1482 | M99367 | Pig alveolar macrophage-derived chemotactic factor-I | 0.04 | |
| | | (AMCF-I) mRNA, compete cds. | | |
| 1483 | U70370 | Human hindlimb expressed homeobox protein backfoot (Bft) | 0.04 | |
| | | mRNA, complete cds | | |
| 1484 | U10698 | Rattus norvegicus liver microsomal carboxylesterase mRNA, | 0.04 | |
| | | complete cds. | | |
| 1485 | U28171 | Trypanosoma cruzi kinetoplast putative maxicircle divergent | 0.04 | |
| 1486 | U79297 | Human clone 23589 mRNA sequence | 0.04 | |
| 1487 | X13764 | Yeast centromere CEN1 repetitive DNA PSS113, part of | 0.04 | |
| 1488 | Z24568 | H. sapiens (D9S286) DNA segment containing | 0.04 | |
| 1489 | M63868 | C. hircus alpha:lactalbumin gene, exons 1-4. | 0.04 | |
| 1490 | X64143 | F. trinervia ppcA1 gene for phosphoenolpyruvate | 0.039 | |
| 1491 | M16339 | Entamoeba histolytica actin mRNA, complete cds. | 0.039 | |
| 1492 | U36475 | Mus musculus breast and ovarian cancer susceptibility | 0.039 | |
| | | protein (Brca1) mRNA, complete cds | | |
| 1493 | X02570 | Flesh fly gene for 25-kDa protein | 0.039 | |
| 1494 | M32475 | Rattus norvegicus carcinoembryonic antigen-related protein | 0.039 | |
| | | (CGM4) gene, exons 2 and 3 | | |
| 1495 | D89609 | Oryzias latipes mRNA for choriogenin H, complete cds | 0.039 | |
| 1496 | AF011573 | Homo sapiens finger protein (ZnF20) mRNA, complete | 0.039 | |
| 1497 | X15050 | Mouse mRNA for 3′-end of NCAM-120 isoform | 0.039 | |
| 1498 | Z11533 | D. discoideum rasG gene | 0.038 | |
| 1499 | AB000450 | Homo sapiens mRNA for VRK2, complete cds | 0.038 | |
| 1500 | X78983 | D. melanogaster Fab-7 regulatory region | 0.038 | |
| 1501 | D89609/ Oryzias latipes mRNA for choriogenin H, complete cds | 0.038 | | |
| 1502 | Z49535 | S. cerevisiae chromosome X reading frame ORF YJR035w | 0.038 | |
| 1503 | L13377 | Staphylococcus aureus enterotoxin gene, 3′ end. | 0.035 | |
| 1504 | L12582 | Human ornithine decarboxylase (ODC) gene, 5′ flanking | 0.035 | |
| 1505 | Z48584 | Caenorhabditis elegans cosmid ZK1321, complete sequence | 0.023 | |
| | | [Caenorhabditis elegans ] | | |
| 1506 | Y00204 | Xenopus laevis mRNA fragment for nucleoplasmin | 0.021 | |
| 1507 | S77817 | light-chain fibroin [Galleria mellonell = waxmoths, larvae, | 0.021 | |
| | | cocoons, posterior silk glands, mRNA, 1191 nt] | | |
| 1508 | L13926 | Trypanosoma cruzi (strain La Cruz, Jalisco) ribosomal RNA | 0.02 | |
| | | transcribed spacer and 18S ribosomal RNA gene, 5′ end. | | |
| 1509 | Z78910 | H. sapiens flow-sorted chromosome 6 HindIII fragment, | 0.02 | |
| 1510 | AB007976 | Homo sapiens mRNA, chromosome 1 specific transcript | 0.02 | |
| 1511 | U01307 | Human scRNA (BC200 beta) psuedogene. | 0.017 | |
| 1512 | J03998 | P. falciparum glutamic acid-rich protein gnen, complete cds. | 0.017 | |
| 1513 | X93497 | H. sapiens TRAP gene, intron 4 (partial) | 0.017 | |
| 1514 | M15656 | Human aldolase B (ALDOB) gene, exons 7 through 9. | 0.016 | |
| 1515 | X74965 | H. sapiens ACPP gene for prostatic acid phosphatase (non- | 0.016 | |
| | | coding region) | | |
| 1516 | X75653 | A. longa piastid genes for ribosomal proteins and tRNAs | 0.016 | |
| 1517 | X75653 | A. longa plastid genes for ribosomal proteins and tRNAs | 0.016 | |
| 1518 | X58852 | Human MLC1emb gene for embryonic myosin alkaline light | 0.016 | |
| | | chain, exon 2 | | |
| 1519 | U69695 | Mus musculus hyaluronan synthase homolog mRNA, | 0.016 | |
| 1520 | S45332 | erythropoietin receptor [human, placental, Genornic, 8647 | 0.016 | |
| 1521 | U09865 | Alcaligenes eutrophus pyruvate dehydrogenase | 0.016 | |
| | | dihydrolipoamide dehydrogenase (pdhL), and ORF3 genes, | 0.016 | |
| 1522 | U67815 | Human primary Alu transcript | 0.016 | |
| 1523 | AE000466 | Escherichia coli K-12 MG1655 section 356 of 400 of the | 0.016 | |
| | | complete genome | | |
| 1524 | M80785 | M. musculus tissue factor promoter (Cf-3) gene, exon 1. | 0.016 | |
| 1525 | L37035 | Drosophila virilis brown protein (bw) gene, complete cds. | 0.016 | |
| 1526 | M15009 | Mouse steroid 21-hydroxylase A (21-OHase A) gene, | 0.016 | |
| 1527 | U67500 | Methanococcus jannaschii section 42 of 150 of the complete | 0.016 | |
| 1528 | AB000044 | Rhizoctonia solani 5.8S rRNA gene, complete sequence | 0.016 | |
| 1529 | X52956 | Human CAMII-psi3 calmodulin retropseudogene | 0.016 | |
| 1530 | U80581 | Pleurodeles waltl Wnt-7a mRNA, complete cds | 0.016 | |
| 1531 | Z69918 | Human DNA sequence from cosmid 91K3, Huntington's | 0.016 | |
| | | Disease Region, chromosome 4p16.3 contains CpG island | | |
| 1532 | Z98031 | Human immunodeficiency virus type 1 nef gene | 0.016 | |
| | | immunodeficiency virus type 1 nef gene (strain KU15-1) | | |
| 1533 | D45858 | Mus musculus mRNA for synaptotagumin III, complete cds | 0.016 | |
| 1534 | L24549 | Gallus gallus Gi2 protein alpha-subunit mRNA, complete | 0.016 | |
| 1535 | U66291 | Catagonus wagneri cytochrome b gene, mitochondrial gene | 0.016 | |
| | | encoding mitochondrial protein, partial cds | | |
| 1536 | X63436 | B. taurus mRNA for poly(A) polymerase | 0.016 | |
| 1537 | L23498 | Bovine microsatellite repeats | 0.015 | |
| 1538 | AF003086 | Plasmodium falciparum transcription factor homolog | 0.015 | |
| | | PfSNF2L mRNA, complete cds | | |
| 1539 | U17377 | Strongylocentrotus purpiratus cortical granule protein with | 0.015 | |
| | | LDL-receptor-like repeats mRINA, partial cds. | | |
| 1540 | L23498 | Bovine microsatellite repeats | 0.015 | |
| 1541 | X85117 | H. sapiens epb72 gene exons 2, 3, 4, 5, 6, 7 | 0.015 | |
| 1542 | Z16906 | H. sapiens (D14S73) DNA segment containing | 0.015 | |
| 1543 | X99400 | S. pneumoniae dacA gene and ORF | 0.015 | |
| 1544 | M32061 | Rat alpha-2B-adrenergic receptor (RNG-alpha-2) mRNA, | 0.015 | |
| 1545 | X80930 | S. cerevisiae RHC18 genes | 0.015 | |
| 1546 | U09865 | Alcaligenes eutrophus pyruvate dehydrogenase | 0.015 | |
| | | dihydrolipoamide dehydrogenase (pdhL), and ORF3 genes, | | |
| 1547 | Z22952 | Mus musculus BALB/c or p65 gene encoding p65 subunit of | 0.015 | |
| | | transcription factor NF-kappaB | | |
| 1548 | L34610 | Mus musculus parathyroid hormone/parathyroid hormone | 0.015 | |
| | | related-peptide receptor (PTHR) gene, exons 5-9. | 0.015 | |
| 1549 | Z54850 | H.sapiens CpG island DNA genomic Mse1 fragment, clone | 0.015 | |
| | | 169b5, reverse read cpg169b5.rt1a | | |
| 1550 | U01307 | Human scRNA (BC200 beta) pseudogene. | 0.015 | |
| 1551 | M54994 | Human bile salt-activated lipase (BAL) mRNA, complete | 0.015 | |
| 1552 | Z98031 | Human immunodeficiency virus type 1 nef gene | 0.015 | |
| | | immunodeficiency virus type 1 nef gene (strain KU15-1) | | |
| 1553 | Z21858 | M. Musculus mRNA for P domain protein | 0.015 | |
| 1554 | M33518 | Human HLA-B-associated transcript 2 (BAT2) gene, 3′ end. | 0.015 | |
| 1555 | AB001383 | Rattus norvegicus mRNA for sialoprotem, complete cds | 0.015 | |
| 1556 | U72787 | Homo sapiens cosmid clone U163C11 from Xp22.1-22.2, | 0.014 | |
| | | complete sequence [Homo sapiens] | | |
| 1557 | AF012899 | Sambucus nigra ribosome inactivating protein precursor | 0.014 | |
| | | mRNA, complete cds | | |
| 1558 | J03764 | Human, plasminogen activator inliibitor-1 gene, exons 2 to | 0.014 | |
| 1559 | AF012899 | Sambucus nigra ribosome inactivating protein precursor | 0.014 | |
| | | mRNA, complete cds | | |
| 1560 | AB003097 | Fruitfly strain g20 mitochondrial DNA, A+T-rich region, | 0.014 | |
| | | partial sequence | | |
| 1561 | AC001017 | Homo sapiens (subclone 2_g8 from P1 H43) DNA sequence | 0.014 | |
| 1562 | Z48484 | H. sapiens gene for tissue-type plasminogen activator | 0.014 | |
| 1563 | AC001460 | Homo sapiens (subclone 2_f4 from BAG H107) DNA | 0.014 | |
| 1564 | U09865 | Alcaligenes eutrophus pyruvate dehydrogenase | 0.014 | |
| | | dihydrolipoamide dehydrogenase (pdhL), and ORF3 genes, | | |
| 1565 | U00691 | Dictyostelium discoideum plasmid Ddp1 D2 orf, D1/D3 orf | 0.014 | |
| | | G4/D5 orf G5/D6 orf, G1 orf, G2/G3/D4 orf complete cds | | |
| 1566 | D16482 | Sarcophage peregrina mRNA for poly(ADP-ribose) | 0.014 | |
| 1567 | AF012899 | Sambucus nigra ribosome inactivating protein precursor | 0.014 | |
| | | mRNA, complete cds | | |
| 1568 | M63599 | Human myelin basic protein (MBP) gene, exon 1. | 0.014 | |
| 1569 | U03891 | Human phorbolin I mRNA, partial cds. | 0.014 | |
| 1570 | X53422 | D. grimshawi s18, s15, s19 and s16 chorion protein genes | 0.013 | |
| 1571 | X01870 | Yeast mitochondrial ori(o) repeat unit of petite mutant 4 | 0.013 | |
| | | (petite strain a-10/3/2/B11) | | |
| 1572 | Z92804 | Caenorhabditis elegans cosmid K05D4, complete sequence | 0.013 | |
| | | [Caenorhabditis elegans] | | |
| 1573 | M76377 | Human cysteine-rich protein (CRP) gene, exons 3 and 4. | 0.013 | |
| 1574 | FD29801 | Mouse mRNA for unknown product, complete cds | 0.013 | |
| 1575 | U77984 | Sus scrofa microsatellite S0058 sequence | 0.013 | |
| 1576 | Z55882 | H. sapiens CpG island DNA genomic Mse1 fragment, clone | 0.013 | |
| | | 70g8, reverse read cpg70g8.rt1a | | |
| 1577 | V00531 | Human interferon genes LeIF-L and LeIF-J and pseudogene | 0.013 | |
| | | LeIF-M with intergenic regions. These genes are located on | | |
| 1578 | Z74361 | S. cerevisiae chromosome IV reading frame ORF YDR065w | 0.013 | |
| 1579 | D00374 | Herpes simplex virus type 1 (HSV-1) genome, rightmost part | 0.013 | |
| | | of the long unique region (UL) and all of the internal long | | |
| 1580 | U53502 | Arabidopsis thaliana chromosome I cosmid g17311 DNA. | 0.013 | |
| 1581 | K03196 | Human interferon-beta-3 gene. | 0.013 | |
| 1582 | M23456 | Zea mays (clone pCIB808) encoding maize nitrite reductase | 0.013 | |
| | | (NiR) cDNA to mRNA, partial cds. | | |
| 1583 | X66120 | H. sapiens F8VWFL DNA of the von Willebrand factor | 0.013 | |
| | | pseudogene (5′portion) | | |
| 1584 | M63962 | Human gastric H,K-ATPase catalytic subunit gene, complete. | 0.011 | |
| 1585 | AF039592 | Homo sapiens succinate dehydrogenase subunit C | 0.007 | |
| 1586 | Y10908 | B. cereus cysA and wapA genes | 0.007 | |
| 1587 | AF048988 | Homo sapiens MutS homolog 5 (MSH5) gene, exons 1 | 0.007 | |
| 1588 | M048988 | Homo sapiens MutS homolog 5 (MSH5) gene, exons 1 | 0.007 | |
| 1589 | D90822 | E. coli genomic DNA, Kohara clone #331(40.1-40.4 min.) | 0.007 | |
| 1590 | D87903 | Mouse mRNA for ARF6, complete cds | 0.006 | |
| 1591 | L38851 | Mycobacterium tuberculosis cell surface protein | 0.006 | |
| 1592 | U66362 | Human neuronal nitric oxide synthase (nNOS) gene, | 0.005 | |
| | | alternatively spliced 5′ exon Tex 2 and flanking sequences | | |
| 1593 | L11670 | Human trausmembrane glycoprotein (CD53) gene, exons 2 | 0.005 | |
| 1594 | U20587 | Sus scrofa domestica sister of P-glycoprotein | 0.005 | |
| 1595 | U53016 | Human DXYS154 microsatellite sequence | 0.005 | |
| 1596 | Z29641 | Zea mays of USE gene encoding U3snRNA | 0.005 | |
| 1597 | D16473 | Human mRNA, Xq terminal portion | 0.005 | |
| 1598 | X02175 | Schizosaccharomyces pombe cdc10 start gene | 0.005 | |
| 1599 | U25029 | Human glucocorticoid receptor alpha mRNA, variant 3′ | 0.005 | |
| 1600 | Z68685 | Human DNA sequence from cosmid N2E9 on chromosome | 0.005 | |
| | | 22, complete sequence [Homo sapiensp] | | |
| 1601 | U40369 | Human spermidine/spermine N1-acetyltransferase | 0.005 | |
| 1602 | U06965 | Aphytis melinus mitochondrion 16S rRNA gene, partial | 0.005 | |
| 1603 | Z81014 | Human DNA sequence from cosmid U65A4, between | 0.005 | |
| | | markers DX5366 and DXS87 on chromosome X * | | |
| 1604 | X91923 | H. sapiens ECE-1 gene (exon 3) | 0.005 | |
| 1605 | Z29641 | Zea mays of USE gene encoding U3snRNA | 0.005 | |
| 1606 | L11670 | Human transmembrane glycoprotein (CD53) gene, exons 2 | 0.005 | |
| 1607 | U15605 | Nicotiana glutinosa virus resistance (N) gene, complete cds. | 0.005 | |
| 1608 | X57698 | A. thaliana DNA for acyl carrier protein (ACP) gene A1 | 0.005 | |
| 1609 | L81391 | Homo sapiens (subclone 2_a6 from P1 H39) DNA sequence | 0.005 | |
| 1610 | X81789 | H. sapiens mRNA for splicing factor SF3a60 | 0.005 | |
| 1611 | X82818 | H. sapiens PTP1C/HCP gene | 0.005 | |
| 1612 | U33465 | Drosophila melanogaster S element and flanking sequence, | 0.005 | |
| 1613 | Z75042 | S. cerevisiae chromosome XV reading frame ORF YOR134w | 0.005 | |
| 1614 | M98574 | Mouse T cell receptor rearranged alpha--chain variable | 0.005 | |
| | | region, N_region, joining region, and constant region | | |
| 1615 | X51907 | Human vimentin gene 5′ regulatoiy region | 0.005 | |
| 1616 | U50383 | Human retinoic acid-responsive protein (NN8-4AG) mRNA, | 0.005 | |
| | | complete cds | | |
| 1617 | M25140 | Human cardiac alpha-myosin heavy chain (MYH6) gene, | 0.005 | |
| | | exons 2, 3 and 4. | | |
| 1618 | X66062 | G. max tufA gene for chloroplast translation elongation | 0.005 | |
| 1619 | U16345 | Gallus gallus protein kinase gene (cPITSLRE) gene, exons 4 | 0.005 | |
| 1620 | AF012899 | Sambucus nigra ribosome inactivating protein precursor | 0.005 | |
| | | mRNA, complete cds | | |
| 1621 | U43834 | Saccharomyces cerevisiae chromosome IV lambda 3073 and | 0.005 | |
| | | flanking region extending into right telomere | | |
| 1622 | X13602 | Caldocellum saccharolyticum celB gene for | 0.005 | |
| | | cellobiohydrolase/endocellulase | | |
| 1623 | J04809 | Human cytosolic adenylate kinase (AK1) gene, complete | 0.005 | |
| 1624 | L49144 | Homo sapiens neuroendocrine-specific protein (NSP) gene, | 0.005 | |
| | | exons 1B and 3 | | |
| 1625 | L34028 | Plasmodium falciparum (clone HB3) heat shock protein 86 | 0.005 | |
| | | gene, complete cds. | | |
| 1626 | U50383 | Human retinoic acid-responsive protein (NN8-4AG) mRNA, | 0.005 | |
| | | complete cds | | |
| 1627 | U23829 | Lucilia cuprina peritrophin-95 precursor gene, partial cds. | 0.005 | |
| 1628 | AE000629.1 | Helicobacter pylori 26695 section 107 of 134 of the | 0.005 | |
| 1629 | M16446 | Human adenine phosphonibosyltransferase (APRT) gene, | 0.005 | |
| | | complete cds. | | |
| 1630 | U34605 | Human retinoic acid- and interferon-inducible 58 K protein | 0.005 | |
| | | RI58 mRNA, complete cds. | | |
| 1631 | M25140 | Human cardiac alpha-myosin heavy chain (MYH6) gene, | 0.005 | |
| | | exons 2, 3 and 4. | | |
| 1632 | X16426 | Mouse MHC (Qa) Q10-k gene for class I antigen | 0.005 | |
| 1633 | M83985 | Mouse phosphoprotein (F1-20) mRNA, complete cds. | 0.005 | |
| 1634 | U31850 | Human dystonin isoform 1 mRNA, partial cds | 0.005 | |
| 1635 | U31850 | Human dystonin isoform 1 mRNA, partial cds | 0.005 | |
| 1636 | X64615 | O. berteriana chloroplast ORF80 (exon 1 and 2) and | 0.005 | |
| | | ORF2280 sequences | | |
| 1637 | X52647 | E. coli dbpA gene for DEAD box protein A | 0.005 | |
| 1638 | D90773 | E. coli genomic DNA, Kohara clone #262(30.3-30.5 min.) | 0.005 | |
| 1639 | M62946 | S. glaucescens novel deletion/rearrangement sequence, | 0.005 | |
| | | partial sequence. | | |
| 1640 | M88597 | Saccharomyces cerevisiae STP1 gene, complete cds. | 0.005 | |
| 1641 | L31521 | Homo sapiens (clone HG52) Z-crystallin/quinone reductase | 0.005 | |
| | | (CRYZ) gene sequence. | | |
| 1642 | D79986 | Human mRNA for KIAA0164 gene, complete cds | 0.004 | |
| 1643 | AC002183 | Homo sapiens (subclone 2_h8 from BAC H111) DNA | 0.004 | |
| 1644 | Z29641 | Zea mays of USE gene encoding U3snRNA | 0.004 | |
| 1645 | L22415 | Homo sapiens DNA sequence, repeat region. | 0.004 | |
| 1646 | U17357 | Chlamydomonas reinhardtii chloroplast 30S ribosomal | 0.004 | |
| | | protein S4 (rps4) gene, complete cds. | | |
| 1647 | M67465 | Rat 3-beta-hydroxysteroid dehydrogenase/delta-5-delta-4- | 0.004 | |
| | | ene-isomerase mRNA, complete cds. | | |
| 1648 | U08421 | Murine rotavirus EC outer capsid protein VP4 gene, | 0.004 | |
| 1649 | Z17089 | H. sapiens (D3S1309) DNA segment containing | 0.002 | |
| 1650 | L35531 | Human Alu repeat region. | 0.002 | |
| 1651 | M55120 | Human cystic fibrosis transmembrane conductance regulator | 0.002 | |
| | | (CFTR) gene, exon 14b | | |
| 1652 | J00922 | Gallus gallus ovalbumin (Y) gene, complete cds. | 0.002 | |
| 1653 | U69695 | Mus musculus hyaluronan synthase homolog mRNA, | 0.002 | |
| 1654 | L15248 | Human (clone: pHyTM1/60(R)) DNA sequence. | 0.002 | |
| 1655 | L35676 | Homo sapiens (subclone H8 2_e7 from P1 35 H5 C8) DNA | 0.002 | |
| 1656 | L48612 | Theileria parva (clone pTprUgB) ORF genes, partial cds. | 0.002 | |
| 1657 | Y08925 | P. falciparum aarp3 gene, exon | 0.002 | |
| 1658 | M60441 | Sheep lambda immunoglobulin V gene. | 0.002 | |
| 1659 | X91857 | Piromyces sp. mRNA for mannanase A | 0.002 | |
| 1660 | Z35948 | S. cerevisiae chromosome II reading frame ORF YBR079c | 0.002 | |
| 1661 | X16277 | Human gene for ornithine decarboxylase ODC (EC 4.1.1.17) | 0.002 | |
| 1662 | X78608 | G. gallus genomic DNA repeat region, clone 9C2 | 0.002 | |
| 1663 | U48449 | Human skeletal muscle ryanodine receptor gene | 0.002 | |
| 1664 | X51875 | Human breakpoint in translocation V-kappa gene region | 0.002 | |
| | | (WB) (partial) (537 bp) | | |
| 1665 | Z24205 | H. sapiens (D12S348) DNA segment containing | 0.002 | |
| 1666 | U85612 | Mus musculus cartilage-derived retinoic acid-sensitive | 0.002 | |
| | | protein/melanoma inhibitory activity protein gene, complete | | |
| 1667 | M61829 | Human alpha-1,3-mannosyl-glycoprotein beta-1, 2-N- | 0.002 | |
| | | acetylglucosaminyltransferase (MGAT) gene, complete cds. | | |
| 1668 | M61829 | Human alpha-1,3-mannosyl-glycoprotein beta-1, 2-N- | 0.002 | |
| | | acetylglucosaminyltransferase (MGAT) gene, complete cds. | | |
| 1669 | V00571 | Human gene encoding prepro form of corticotropin releasing | 0.002 | |
| 1670 | D29760 | Candida maltosa gene for chitin synthase 1, partial sequence | 0.002 | |
| 1671 | AJ001817 | Dama sp. mRNA for bone morphogenetic protein 2 | 0.002 | |
| 1672 | Z23575 | H. sapiens (D17S926) DNA segment containing | 0.002 | |
| 1673 | X59359 | T. marmorata mRNA for acetylcholinesterase | 0.002 | |
| 1674 | D12519 | Rat SAP gene for synaptotagmin associated 35kDa protein | 0.002 | |
| 1675 | U88534 | Mus musculus glucose-6-phosphate dehydrogenase protein, | 0.002 | |
| | | exons 10, 11 and partial cds | | |
| 1676 | Z24391 | H. sapiens (D11S1350) DNA segment containing | 0.002 | |
| 1677 | M31773 | Murine B cell 1 (mb-1) gene, complete cds. | 0.002 | |
| 1678 | U28014 | Human cysteine protease (ICErel-II) mRNA, complete cds. | 0.002 | j |
| 1679 | M33518 | Human HLA-B-associated franscript 2 (BAT2) gene, 3′ end. | 0.002 | |
| 1680 | U70983 | Pseudomonas aeruginosa heptosyl transferase II | 0.002 | |
| | | Pseudomonas aeruginosa heptosyl transferase II (rfaF) gene, | | |
| 1681 | Z74854 | S. cerevisiae chromosome XV reading frame ORF YOL112w | 0.002 | |
| 1682 | M13498 | Mouse renal kallikrein gene mGK-6, exon 1 | 0.002 | |
| 1683 | U17382 | Streptococcus pyogenes putative multiple membrane domain | 0.002 | |
| | | protein gene, complete cds. | | |
| 1684 | U14189 | Plasmodium falciparum MCP1 mRNA, complete cds | 0.001 | |
| 1685 | M27314 | Saccharomyces cerevisiae mitochondrial petite mutant BB5 | 0.001 | |
| | | origin of replication DNA. | | |
| 1686 | M64089 | Diclyostelium discoideum calmodulin (calA) gene, complete | 0.001 | |
| 1687 | J05138 | Rabbit calcium binding protein (calreticulin) mRNA, | 0.0009 | |
| 1688 | U92017 | Human clone 199288 defective mariner transposon Hsmar2 | 0.0008 | |
| | | mRNA sequence | | |
| 1689 | AJ011915 | Homo sapiens mRNA for synaptosome associated protein of | 0.0008 | |
| | | 23 kilodaltons, isoform A | | |
| 1690 | AJ223734 | Sus scrofa SCAMP1 gene, exon 1 and joined CDS | 0.0008 | |
| 1691 | Y08924 | P. falciparum mRNA for AARP2 protein | 0.0006 | |
| 1692 | X58139 | Human coxVIb gene, last exon and flanking sequence | 0.0006 | |
| 1693 | U47853 | Araneus diadematus fibroin-1 (ADF-1) mRNA, partial cds | 0.0006 | |
| 1694 | L34027 | Plasmodium falciparum (clone Dd2) heat shock protein 86 | 0.0006 | |
| | | gene, complete cds. | | |
| 1695 | D88271 | Human (lambda) DNA for immunogloblin light chain | 0.0006 | |
| 1696 | AC001546 | Homo sapiens (subclone 2_b1 from P1 H69) DNA sequence | 0.0006 | |
| 1697 | Z96325 | H. sapiens telomeric DNA sequence, clone 16QTEL024, | 0.0006 | |
| | | read 16QTELOO024.seq | | |
| 1698 | U14974 | Saccharomyces cerevisiae Nmd2p (NMD2) gene, complete | 0.0006 | |
| | | cds. > :: gb\|I70400\|I70400 Sequence 1 from patent US | | |
| 1699 | AB002331 | Human mRNA for KIAA0333 gene, partial cds | 0.0006 | |
| 1700 | AE000464 | Escherichla coli K-12 MG1655 section 354 of 400 of the | 0.0006 | |
| | | complete genome | | |
| 1701 | Z79060 | H. sapiens flow-sorted chromosome 6 HindIII fragment, | 0.0005 | |
| 1702 | Z60233 | H. sapiens CpG island DNA genomic Mse1 fragment, clone | 0.0005 | |
| | | 197c9, reverse read cpg197c9.rt1a | | |
| 1703 | U15018 | Dugbe virus L protein gene, complete cds | 0.0005 | |
| 1704 | X77607 | H. sapiens genomic DNA (leukocyte), corresponding to the | 0.0005 | |
| | | integration site of HPV 6a DNA in a tonsillar carcinoma | | |
| 1705 | M59428 | T. thermophila ribosomal protein L37 (L37) mRNA, | 0.0005 | |
| 1706 | M59428 | T. thermophila ribosomal protein L37 (L37) mRNA, | 0.0005 | |
| 1707 | AC002219 | Homo sapiens (subclone 2_d11 from P1 H43) DNA | 0.0005 | |
| 1708 | X95276 | P. falciparum complete gene map of plastid-like DNA (IR-B) | 0.0005 | |
| 1709 | L18972 | Homo sapiens anonymous gene, complete cds | 0.005 | |
| 1710 | U96974 | Homo sapiens MET proto-oncogene, intron 5, 3′ end | 0.0005 | |
| 1711 | Z60916 | H. sapiens CpG island DNA genoniic Mse1 fragment, clone | 0.0005 | |
| | | 39a5, forward read cpg39a5.ft1c | | |
| 1712 | X99587 | A. brasilense ipdC, gltX & cysS genes | 0.0005 | |
| 1713 | J03998 | P. falciparum glutamic acid-rich protein gnen, complete cds. | 0.0005 | |
| 1714 | AE000464 | Escherichla coli K-12 MG1655 section 354 of 400 of the | 0.0005 | |
| | | complete genome | | |
| 1715 | U21730 | Human 5′-nucleotidase (CD73) gene, partial cds. | 0.0004 | |
| 1716 | M22970 | Human pancreatic phospholipase A-2 (PLA-2) gene, exons 1 | 0.0003 | |
| 1717 | U37022 | Human cyclin-dependent kinase 4 (CDK4) gene, complete | 0.0002 | |
| 1718 | AC001517 | Homo sapiens (subclone 1_g5 from P1 H49) DNA sequence | 0.0002 | |
| 1719 | X90383 | A. thaliana DNA for Y13 gene | 0.0002 | |
| 1720 | NM_003407.1 | Homo sapiens zinc finger protein homologous to Zfp-36 in | 0.0002 | |
| | | mouse (ZFP36) mRNA > :: gb\|M92843\|HUMG0S24A | | |
| | | H. sapiens zinc finger transcriptional regulator mRNA, | | |
| 1721 | M86528 | Human neurotrophin-4 (NT-4) gene, complete cds. | 0.0002 | |
| 1722 | M86528 | Human neurotrophin-4 (NT-4) gene, complete cds. | 0.0002 | |
| 1723 | U19241 | Homo sapiens interferon-gamma receptor alpha chain gene | 0.0002 | |
| 1724 | M15205 | Human thymidine kinase gene, complete cds, with clustered | 0.0002 | |
| | | Alu repeats in the introns. | | |
| 1725 | M87510 | Mouse Y specific region of AC11 DNA sequence, LINE | 0.0002 | |
| | | repeat and Bkm satellite. | | |
| 1726 | Z84723 | Human DNA sequence from phage LAW2 from a contig | 0.0002 | |
| | | from the tip of the short arm of chromosome 16, spanning | | |
| | | 2Mb of 16p13.3 Contains Interleukin 9 receptor pseudogene | | |
| 1727 | X01392 | Human apolipoprotein CIII gene and apo AI-apo CIII | 0.0002 | |
| 1728 | Z92910 | H. sapiens HFE (HLA-H) gene | 0.0002 | |
| 1729 | D87001 | Human (lambda) DNA for immunoglobulin light chain | 0.0002 | |
| 1730 | M35612 | Yeast (S. cerevisiae) mitochondrial autonomously replicating | 0.0002 | |
| | | sequence DNA | | |
| 1731 | Z16956 | H. sapiens (D2S154) DNA segment containing | 0.0002 | |
| 1732 | L42456 | Mus musculus TGF-t gene, promoter region and exon I. | 0.0002 | |
| 1733 | X90383 | A. thaliana DNA for Y13 gene | 0.0002 | |
| 1734 | L35657 | Homo sapiens (subclone H8 5_a10 from P1 35 H5 C8) DNA | 0.0002 | |
| 1735 | M57902 | Mouse transforming growth factor-beta-1 | 0.0002 | |
| 1736 | U67167 | Homo sapiens intestinal mucin (MUC2) gene, promoter | 0.0002 | |
| | | region and partial cds | | |
| 1737 | NM_002824.1 | Homo sapiens parathymosin (PTMS) mRNA > :: | 0.0002 | |
| | | gb\|M24398\|HUMTHYP Human parathymosin MRNA, | | |
| 1738 | J05138 | Rabbit calcium binding protein (calreticulin) mRNA, | 0.0002 | |
| 1739 | U96566 | HIV-1 patient JO population variant JOS17 from USA, | 0.0002 | |
| | | envelope glycoprotem, C2-V5 region (env) gene, partial cds | | |
| 1740 | AF043461 | Homo sapiens I-REL gene, exon 9 | 9e-005 | |
| 1741 | M96943 | Human profilaggrin gene exons 1-3, 5′ end. | 8e-005 | |
| 1742 | S45332 | erythropoietin receptor [human, placental, Genomic, 8647 | 7e-005 | |
| 1743 | S45332 | erythropoietin receptor [human, placental, Genomic, 8647 | 7e-005 | |
| 1744 | L28125 | Podospora anserina beta transducin-like protein | 7e-005 | |
| 1745 | U53017 | Human microsatellite marker sJCW13 | 6e-005 | |
| 1746 | M86528 | Human neurotrophin-4 (NT-4) gene, complete cds. | 6e-005 | |
| 1747 | D17554 | Human mRNA for DNA-binding protein, TAXREB107, | 6e-005 | |
| 1748 | U26556 | Human ferritin H (FTHL13) pseudogene. | 6e-005 | |
| 1749 | Z79060 | H. sapiens flow-sorted chromosone 6 HindIII fragment, | 6e-005. | |
| 1750 | AC001460 | Homo sapiens (subclone 2_f4 from BAC H107) DNA | 6e-005 | |
| 1751 | AC001033 | Homo sapiens (subclone 2_c2 from P1 H48) DNA sequence | 6e-005 | |
| 1752 | AF007883 | Homo sapiens MHC class II HLA-DRB1 (HLA-DRB1*10) | 6e-005 | |
| | | intron 1 sequence | | |
| 1753 | U12971 | Tetrahymena thermophila CU428.1VII micronuclear M | 6e-005 | |
| 1754 | X83872 | H. vulgaris mRNA for cAMP response element binding | 6e-005 | |
| 1755 | Z73360 | Human DNA sequence from cosmid 92M18, BRCA2 gene | 5e-005 | |
| | | region chromosome 13q12-13 | | |
| 1756 | X85116 | H. sapiens epb72 gene exon 1 | 5e-005 | |
| 1757 | L81639 | Homo sapiens (subclone 2_b2 from P1 H39) DNA sequence | 3e-005 | |
| 1758 | D16184 | Chicken mRNA for nuclear b-Zip protein MafF, complete | 3e-005 | |
| 1759 | AF100694 | Mus musculus Pontin52 mRNA, complete cds | 3e-005 | |
| 1760 | Z30978 | G. gorilla DNA for Mhc Alu elements | 3e-005 | |
| 1761 | L23429 | Canis beta-galactosides-binding lectin (LGALS3) mRNA, | 2e-005 | |
| 1762 | X06559 | Human interferon-inducible gene IFI-56K 5′ region (56 kDa | 2e-005 | |
| | | coding capacity of unknown function) | | |
| 1763 | AC001546 | Homo sapiens (subclone 2_b1 from P1 H69) DNA sequence | 2e-005 | |
| 1764 | L35658 | Homo sapiens (subclone H8 9_d12 from P1 35 H5 C8) | 2e-005 | |
| 1765 | D16472 | Human mRNA, Xq terminal portion | 2e-005 | |
| 1766 | M83665 | Human high mobility group 2 protein (HMG-2) gene | 2e-005 | |
| 1767 | U07977 | Human T cell receptor beta (TCRBV9S1, TCRBV7S1) | 2e-005 | |
| | | genes, TCRBV inserted and TCRBV deleted haplotype, | | |
| 1768 | D83227 | Populus nigra gene for extensin like protein, complete cds | 2e-005 | |
| 1769 | U42053 | Mustela vison microsatellite repeat (Mvi 24). | 2e-005 | |
| 1770 | L29339 | Homo sapiens Na+/glucose cotransporter (SGLT1) gene, | 2e-005 | |
| | | exon 15 and complete cds. | | |
| 1771 | Z33620 | M. musculus (Balb/c) GATA-3 gene (partial) | 2e-005 | |
| 1772 | D88271 | Human (lambda) DNA for immunogloblin light chain | 2e-005 | |
| 1773 | AD000833 | Homo sapiens DNA from chromosome 19-cosmid f19399 | 2e-005 | |
| | | (˜17 kb EcoRI restriction fragment) | | |
| 1774 | U36755 | Human thrombin receptor (F2R) gene, 5′ region and partial | 2e-005 | |
| 1775 | AC002252 | Homo sapiens (subclone 1_g7 from BAC H76) DNA | 2e-005 | |
| 1776 | AE000464 | Escherichia coli K-12 MG1655 section 354 of 400 of the | 2e-005 | |
| | | complete genome | | |
| 1777 | X94768 | H. sapiens RP3 gene (XLRP gene 3) | 1e-005 | |
| 1778 | U57058 | Human WD protein IR10 pre-mRNA, partial cds | 9e-006 | |
| 1779 | AC001603 | Homo sapiens (subclone 2_a9 from PAC H92) DNA | 8e-006 | |
| 1780 | Z47046 | Human cosmid QLL2C9 from Xq28 | 7e-006 | |
| 1781 | U93275 | Mus musculus glucokinase gene, 5′ flanking region | 7e-006 | |
| 1782 | X60653 | human Histone H3.3 pseudogene (CIR-456) | 7e-006 | |
| 1783 | L81583 | Homo sapiens (subclone 3_g2 from P1 H11) DNA sequence | 6e-006 | |
| 1784 | L13381 | Plasmodium falciparum HB3\W2 transport protein | 6e-006 | |
| 1785 | U97576 | Homo sapiens TRE17 oncogene-associated GOS19- | 6e-006 | |
| | | 2/MIP1alpha gene, downstream sequence | | |
| 1786 | Y11204 | V. carteri gene encoding volvoxopsin | 6e-006 | |
| 1787 | Z16794 | H. sapiens (D4S409) DNA segment containing (CA) repeat; | 6e-006 | |
| | | clone AFM183xd6; single read | | |
| 1788 | D83737 | Human coagulation factor XII gene, intron 2 | 6e-006 | |
| 1789 | X04871 | Paramecium primaurelia macronuc1ear DNA telomeric | 6e-006 | |
| 1790 | M14292 | Human L1Heg repetitive element from the intergenic region | 6e-006 | |
| | | of the epsilon and G-gamnma globin genes. | | |
| 1791 | NM_003734.1 | Homo sapiens amine oxidase, copper containing 3 | 6e-006 | |
| | | gb\|U39447\|HSU39447 Human placenta copper monamine | | |
| | | oxidase mRNA, complete cds | | |
| 1792 | M27147 | Human alpha-2-plasmin inhibitor, allele A, 5′ end. | 6e-006 | |
| 1793 | X86012 | Human DNA sequence from intron 22 of the factor VIII | 6e-006 | |
| | | gene, Xq28. Contains the end of a 9.5 kb repeated region, | | |
| | | int22h-1, involed in many cases of haemophilia | | |
| 1794 | M33216 | Human aortic-type smooth muscle alpha-actin | 3e-006 | |
| 1795 | Z83334 | H. sapiens RPS3a gene | 2e-006 | |
| 1796 | M57682 | Rat brain calcium channel alpha-1 subunit mRNA, complete | 2e-006 | |
| 1797 | M19817 | Human apolipoprote1n B-100 (apoB) gene, intron J. | 2e-006 | |
| 1798 | Z24068 | H. sapiens (D22S427) DNA segment containing | 2e-006 | |
| 1799 | Z50155 | X. laevis mRNA for insulin-like growth factor I receptor | 2e-006 | |
| 1800 | Y12839 | H. sapiens BH30 mRNA | 2e-006 | |
| 1801 | Z70041 | Human DNA sequence from cosmid U39H5, between | 2e-006 | |
| | | markers DXS6791 and DXS8038 on chromosome X | | |
| 1802 | Z80128 | H. sapiens CACNL1A4 gene, exons 16 and 17 | 2e-006 | |
| 1803 | U80893 | Mus musculus CAG trinucleotide repeat mRNA, partial | 2e-006 | |
| 1804 | Z63192 | H. sapeins CpG island DNA genomic Mse1 fragment, clone | 2e-006 | |
| | | 7a7, forward read cpg7a7.ft1d | | |
| 1805 | U72964 | Human hepatocyte nuclear factor 4-alpha gene, exon 5 | 2e-006 | |
| 1806 | AC002183 | Homo sapiens (subclone 2_h8 from BAC H111) DNA | 2e-006 | |
| 1807 | S73557 | annexin II = 36 kDa calcium-dependent phospholipid-binding | 2e-006 | |
| | | protein [rats, RBL-2H3 basophilic leukemia cells, mRNA, | | |
| 1808 | U79258 | Human clone 23732 mRNA, partial cds | 8e-007 | |
| 1809 | Z62146 | H. sapiens CpG island DNA genomic Mse1 fragment, clone | 8e-007 | |
| | | 64b2, forward read cpg64b2.ft1a | | |
| 1810 | U44381 | Human tissue inhibitor of metalloprotemases-2 | 8e-007 | |
| 1811 | Z65575 | H. sapiens CpG island DNA genomic Mse1 fragment; clone | 7e-007 | |
| | | 47c5, reverse read cpg47c5.rt1a | | |
| 1812 | J03764 | Human, plasminogen activator inhibitor-1 gene, exons 2 to | 7e-007 | |
| 1813 | X75349 | H. sapiens 5′flanking DNA for clotting factor IX | 7e-007 | |
| 1814 | Z73360 | Human DNA sequence from cosmid 92M18, BRCA2 gene | 7e-007 | |
| | | region chromosome 13q12-13 | | |
| 1815 | Z73360 | Human DNA sequence from cosmid 92M18, BRCA2 gene | 7e-007 | |
| | | region chromosome 13q12-13 | | |
| 1816 | X77624 | H. sapiens simple sequence clone pg2m3, 5′ flank and repeats | 7e-007 | |
| 1817 | S46857 | SCL/TCL5/tal-1 = stem-cell leukemia {germline chromosome | | |
| | | 3 translocation/deletion breakpoint} [human, bone marrow | | |
| | | cells, Genomic Mutant, 239 nt] | | |
| 1818 | J03998 | P. falciparum glutamic acid-rich protein gnen, complete cds. | 7e-007 | |
| 1819 | AF012899 | Sambucus nigra ribosome inactivating protein precursor | 3e-007 | |
| | | mRNA, complete cds | | |
| 1820 | U47654 | Human pyruvate kinase PK-R gene, partial cds, and pyruvate | 3e-007 | |
| | | kinase PK-L gene, complete cds. | | |
| 1821 | U78096 | Human macrophage colony stimulating factor receptor (c- | 3e-007 | |
| | | fms) gene, exon 1A, 2 and partial cds | | |
| 1822 | L76927 | Human galactokinase (GALK1) gene, complete cds | 3e-007 | |
| 1823 | U22086 | Ursus americanus clone G10H GT and ATTT microsatellite | 3e-007 | |
| 1824 | J03069 | Human MYCL2 gene, complete cds. | 3e-007 | |
| 1825 | X82640 | D. melanogaster mRNA for alpha 1,2 mannosidase | 3e-007 | |
| 1826 | U18671 | Human Stat2 gene, complete cds. | 2e-007 | |
| 1827 | L02935 | Human major breakpoint cluster region (BCR) gene, exons 1- | 2e-007 | |
| | | 3 and repeat regions. | | |
| 1828 | L04193 | Human lens membrane protein (mp19) gene, exon 11. | 2e-007 | |
| 1829 | AC001050 | Homo sapiens (subclone 3_e9 from P1 H55) DNA sequence | 2e-007 | |
| 1830 | AF012899 | Sambucus nigra ribosome inactivating protein precursor | 2e-007 | |
| | | mRNA, complete cds | | |
| 1831 | AF012899 | Sambucus nigra ribosome inactivating protein precursor | 9e-008 | |
| | | mRNA, complete cds | | |
| 1832 | L78776 | Homo sapiens (subclone 2_a7 from P1 H49) DNA sequence | 9e-008 | |
| 1833 | U41315 | Human ring zinc-finger protein (ZNF127-Xp) gene and 5′ | 9e-008 | |
| | | flanking sequence. | | |
| 1834 | X95586 | H. sapiens MB1 gene | 9e-008 | |
| 1835 | M33387 | Human debrisoquine 4-hydroxylase (CYP2D8P) and | 9e-008 | |
| 1836 | U09954 | Human ribosomal protein L9 gene, 5′ region and complete | 8e-008 | |
| 1837 | Z15030 | H. sapiens gene for ventricular myosin light chain 2 > :: | 8e-008 | |
| | | gb\|L01652\|HUMVMLC Human ventricular myosin light | | |
| | | chain 2 gene, seven exons. | | |
| 1838 | AF012899 | Sambucus nigra ribosome inactivating protein precursor | 8e-008 | |
| | | mRNA, complete cds | | |
| 1839 | AF012899 | Sambucus nigra ribosome inactivating protein precursor | 8e-008 | |
| | | mRNA, complete cds | | |
| 1840 | Z77974 | H. sapiens flow-sorted chromosome 6 HindIII fragment, | 8e-008 | |
| 1841 | AF012899 | Sambucus nigra ribosome inactivating protein precursor | 8e-008 | |
| | | mRNA, complete cds | | |
| 1842 | L81802 | Homo sapiens (subclone 1_c12 from P1 H31) DNA | 8e-008 | |
| 1843 | D87001 | Human (lambda) DNA for immunoglobulin light chain | 8e-008 | |
| 1844 | Z23971 | H. sapiens (D2S338) DNA segment containing (CA) repeat; | 8e-008 | |
| | | clone AFM276zf5; single read | | |
| 1845 | X89398 | H. sapeins ung gene for uracil DNA-glycosylase | 3e-008 | |
| 1846 | Z68212 | Phocine Herpesvirus 1 DNA (clone 4; 280 bp) | 3e-008 | |
| 1847 | M85145 | Human tumor necrosis factor receptor, 3′ flank. | 3e-008 | |
| 1848 | M17919 | Human DNA with homology to EBV IR3 repeat, clone Hu3. | 3e-008 | |
| 1849 | M21339 | Human non-histone chromosomal protein HMG-14 gene, | 3e-008 | |
| | | complete cds. | | |
| 1850 | Z69655 | Human DNA sequence from cosmid L98A6, Huntington's | 3e-008 | |
| | | Disease Region, chromosome 4p16.3 | | |
| 1851 | S83526 | red photopigment gene {Alu repeat region, long intron 1} | | |
| | | [human, peripheral blood leucocytes, Genomic, 1987 net] | | |
| 1852 | M11809 | Human (2′-5′) oligo A synthetase E gene, exon 7 and flanks. | 3e-008 | |
| 1853 | X94768 | H. sapiens RP3 gene (XLRP gene 3) | 3e-008 | |
| 1854 | X62025 | H. sapiens rod cG-PDE G gene for 3′,5′-cyclic nucleotide | 3e-008 | |
| | | phosphodiesterase | | |
| 1855 | NM_000694.1 | Homo sapiens aldehyde dehydrogenase 7 (ALDH7) mRNA | 3e-008 | |
| | | > :: gb\|U10868\|HSU10868 Human aldehyde dehydrogenase | | |
| | | ALDH7 mRNA, complete cds. | | |
| 1856 | U22086 | Ursus americanus clone G10H GT and ATTT microsatellite | 3e-008 | |
| 1857 | AC001174 | Homo sapiens (subclone 1_e2 from BAC H94) DNA | 3e-008 | |
| 1858 | X69908 | H. sapiens gene for mitochondrial ATP synthase c subunit | 2e-008 | |
| 1859 | X91233 | H. sapiens IL15 gene | 2e-008 | |
| 1860 | M61835 | Human lactase phlorizin hydrolase (LCT) gene, exon 2. | 1e-008 | |
| 1861 | M29324 | Mouse L1Md-A13 repetitive sequence. | 1e-008 | |
| 1862 | AF021806 | Rattus norvegicus connexin 40 (GJA5) mRNA, complete cds | 1e-008 | |
| 1863 | AB002584 | Rattus norvegicus mRNA for beta-alanine-pyruvate | 1e-008 | |
| | | aminotransferase, complete cds | | |
| 1864 | Z54147 | Human DNA sequence from cosmid L129H7, Huntington's | 9e-009 | |
| | | Disease Region, chromosome 4p16.3 contains CpG island | | |
| 1865 | AF012899 | Sambucus nigra ribosome inactivating protein precursor | 9e-009 | |
| | | mRNA, complete cds | | |
| 1866 | Z54349 | H. sapiens MN/CA9 GENE | 8e-009 | |
| 1867 | M21487 | Human muscle creatine kinase gene (CKMM), 5′ flank. | 3e-009 | |
| 1868 | U02993 | Human cytochrome P450 (Cyp1A2) gene, 5′ region. | 3e-009 | |
| 1869 | Z78893 | H. sapiens flow-sorted chromosome 6 HindIII fragment, | 3e-009 | |
| 1870 | U89387 | Human RNA polymerase II subunit hsRPB4 gene, complete | 3e-009 | |
| 1871 | X57413 | Mouse mRNA for transforming growth factor-beta2 | 3e-009 | |
| 1872 | Z94828 | G. gallus microsatellite DNA (LEI0260 | 3e-009 | |
| 1873 | D26067 | Human mRNA for KIAA0033 gene, partial cds | 3e-009 | |
| 1874 | AB001914 | Homo sapiens PACE4 gene, exon 23-25, complete cds | 3e-009 | |
| 1875 | Z75894 | Human DNA sequence from cosmid U61F10, between | 3e-009 | |
| | | markers DXS366 and DXS87 on chromosome X contains | | |
| 1876 | AC001443 | Homo sapiens (subclone 2_f10 from BAC 2913 | 3e-009 | |
| 1877 | M96851 | Human CpG island containing upstream sequence | 3e-009 | |
| 1878 | D64108 | Human mRNA for DMC1 homologue, complete cds | 3e-009 | |
| 1879 | S80861 | {junction region} [human, KOPT-K1 cells, T-cell acute | 3e-009 | |
| | | lymphoblastic leukemia patient, Genomic, 895 nt] | | |
| 1880 | U79776 | Mus musculus ajuba (Ajuba) mRNA, complete cds | 2e-009 | |
| 1881 | S75283 | thyrotropin-releasing hormone receptor [human, Genomic, | 1e-009 | |
| | | 2312 nt, segment 2 of 2] | | |
| 1882 | X14445 | Human int-2 proto-oncogene | 1e-009 | |
| 1883 | J03764 | Human, plasminogen activator inhibitor-1 gene, exons 2 to | 1e-009 | |
| 1884 | L36911 | Pig microsatellite DNA (CA repeat) | 1e-009 | |
| 1885 | U79746 | Homo sapiens serotonin transporter (hSERT) gene, promoter | 9e-010 | |
| | | region, exons 1B and 2, and partial cds | | |
| 1886 | X56668 | Human DNA for calretinin exon 1 | 9e-010 | |
| 1887 | AF012899 | Sambucus nigra ribosome inactivating protein precursor | 9e-010 | |
| | | mRNA, complete cds | | |
| 1888 | X77738 | H. sapiens red cell anion exchanger (EPB3, AE1, Band 3) | 4e-010 | |
| | | gene, 3′ region | | |
| 1889 | L02897 | Dog nonerythroid beta-spectrin mRNA, 3′ end. | 3e-010 | |
| 1890 | D45198 | Human mRNA for template acyivating factor-I alpha, | 3e-010 | |
| 1891 | X04981 | H. sapiens gene for lecithin-cholesterol acyltransferase | 3e-010 | |
| 1892 | M14292 | Human L1Heg repetitive element from the intergenic region | 3e-010 | |
| | | of the epsilon and G-gamma globin genes. | | |
| 1893 | X14448 | Human GLA gene for alpha-D-galactosidase A (EC | 3e-010 | |
| 1894 | Z96616 | H. sapiens telomeric DNA sequence, clone 4QTEL025, read | 3e-010 | |
| | | 4QTELOO025.seq | | |
| 1895 | M12901 | Human c-mos pseudogene with Alu repeat insertions, partial | 2e-010 | |
| 1896 | Z68885 | Human DNA sequence from cosmid L21F12B, Huntington's | 1e-010 | |
| | | Disease Region, chromosome 4p16.3, contains EST | | |
| 1897 | L77036 | Homo sapiens (subclone 5_d9 from P1 H19) DNA | 1e-010 | |
| 1898 | Z58927 | H. sapiens CpG island DNA genomic Mse1 fragment, clone | 1e-010 | |
| | | 116g2, reverse read cpg116g2.rt1a | | |
| 1899 | L77036 | Homo sapiens (subclone 5_d9 from P1 H19) DNA | 1e-010 | |
| 1900 | Z79007 | H. sapiens flow-sorted chromosome 6 HindIII fragment, | 1e-010 | |
| 1901 | Z75891 | Human DNA sequence from cosmid F45C1 on chromosome | 1e-010 | |
| 1902 | Z72930 | S. cerevisiae chromosome VII reading frame ORF YGR145w | 1e-010 | |
| 1903 | Z36111 | S. cerevisiae chromosome II reading frame ORF YBR242w | 5e-011 | |
| 1904 | Z54147 | Human DNA sequence from cosmid L129H7, Huntington's | 4e-011 | |
| | | Disease Region, chromosome 4p16.3 contains CpG island | | |
| 1905 | X87579 | H. sapiens CD4 gene | 4e-011 | |
| 1906 | U43604 | Human unidentified mRNA, partial sequence. | 4e-011 | |
| 1907 | U08024 | Human clone A dehydroepiandrosterone sulfotransferase | 4e-011 | |
| | | (STD) mRNA, complete cds. | | |
| 1908 | M27825 | B. lactucae heat shock protein 70 (hsp70) gene, complete | 4e-011 | |
| 1909 | Z15026 | H. sapiens genes for tumor necrosis factor (Tnfa) and | 3e-011 | |
| | | lymphotoxine (Tnfb) | | |
| 1910 | Z67997 | Human DNA sequence from cosmid L206D7, Huntington's | 3e-011 | |
| | | Disease Region, chromosome 4p16.3 | | |
| 1911 | AC001046 | Homo sapiens (subclone 3_f2 from P1 H54) DNA sequence | 2e-011 | |
| 1912 | Z84518 | H. sapiens flow-sorted chromosome 6 HindIII fragment, | 1e-011 | |
| 1913 | M59709 | Human carcinoembryonic antigen (CEA) gene, exon 10. | 1e-011 | |
| 1914 | L35670 | Homo sapiens (subclone H8 10_g5 from P1 35 H5 C8) | 1e-011 | |
| 1915 | AF012899 | Sambucus nigra ribosome inactivating protein precursor | 1e-011 | |
| | | mRNA, complete cds | | |
| 1916 | Z96209 | H. sapiens telomeric DNA sequence, clone 12PTEL055, read | 1e-011 | |
| | | 12PTELOO055.seq | | |
| 1917 | U34052 | Human Down Syndrome region of chromosome 21, genomic | 1e-011 | |
| | | sequence, clone A35A7-1A2 | | |
| 1918 | Z96489 | H. sapiens telomeric DNA sequence, clone 21QTEL007, | 1e-011 | |
| | | read 21QTELOO007.seq | | |
| 1919 | AC001036 | Homo sapiens (subclone 2_f7 from P1 H48) DNA sequence | 1e-011 | |
| 1920 | L42098 | Homo sapiens (subclone 5_c7 from P1 H22) DNA sequence. | 6e-012 | |
| 1921 | X93341 | H. sapiens mitochondrial control region DNA | 5e-012 | |
| 1922 | D26141 | Human NF1 gene homologue | 4e-012 | |
| 1923 | U80228 | Human clotting factor VIII gene, intron 20 and exon 21, | 4e-012 | |
| | | partial sequence | | |
| 1924 | U16812 | Human Bak-2 gene, complete cds. | 4e-012 | |
| 1925 | Z68758 | Human DNA sequence from cosmid nN85E10 on | 4e-012 | |
| | | chromosome 22q11.2-qter | | |
| 1926 | AC001449 | Homo sapiens (subclone 2_f10 from P1 H103) DNA | 4e-012 | |
| 1927 | D50561 | Human DNA, replication enhancing element (REEl) | 4e-012 | |
| 1928 | Z96387 | H. sapiens telomeric DNA sequence, clone 18PTEL033, read | 1e-012 | |
| | | 18PTELOO033.seq | | |
| 1929 | AF004338 | Homo sapiens 16S ribosomal RNA, mitochondrial gene, | 1e-012 | |
| | | partial sequence | | |
| 1930 | M15360 | Human transposon-like element (THE) p2 solo LTR with | 1e-012 | |
| | | inserted Alu element. | | |
| 1931 | L81577 | Homo sapiens (subclone 3_h8 from P1 H11) DNA sequence | 1e-012 | |
| 1932 | U56979 | Human complement factor H precursor (Cfh) gene, partial | 1e-012 | |
| 1933 | U14550 | Human sialyltransferase SThM (sthm) mRNA, complete cds. | 1e-012 | |
| 1934 | M31061 | Human ornithine decarboxylase gene, complete cds. | 1e-012 | |
| 1935 | U06752 | Rattus norvegicus Fisher 344 pre-sialomucin complex | 1e-012 | |
| | | (pSMC) mRNA, repeat sequences 10-14, partial cds. | | |
| 1936 | U06752 | Rattus norvegicus Fisher 344 pre-sialomucin complex | 1e-012 | |
| | | (pSMC) mRNA, repeat sequences 10-14, partial cds. | | |
| 1937 | L29096 | Homo sapiens oriP binding protein (OBP-2) mRNA, | 1e-012 | |
| 1938 | U50156 | Human DNA segment containing CA repeat at locus | 5e-013 | |
| 1939 | X65708 | H. sapiens RRM1 gene for ribonucleoside diphosphate | 5e-013 | |
| | | reductase M1 subunit | | |
| 1940 | M61107 | Human p22-phox (CYBA) gene, exons 3 and 4. | 5e-013 | |
| 1941 | AC001502 | Homo sapiens (subclone 2_c7 from P1 H43) DNA sequence | 4e-013 | |
| 1942 | X69951 | H. sapiens gene for casein kinase II alpha subunit > subunit | 4e-013 | |
| | | alpha [human, Genomic, 18862 nt] | | |
| 1943 | AC002252 | Homo sapiens (subclone 1_g7 from BAC H76) DNA | 4e-013 | |
| 1944 | Z74029 | Caenorhabditis elegans cosmid C45B11, complete sequence | 4e-013 | |
| | | [Caenorhabditis elegans] | | |
| 1945 | U90544 | Human sodium phosphate transporter (NPT3) mRNA, | 1e-013 | |
| 1946 | L77032 | Homo sapiens (subclone 3_e5 from P1 H16) DNA sequence. | 2e-013 | |
| 1947 | X55367 | Human alpha-satellite DNA from clone pTRA-2 | 2e-013 | |
| 1948 | U40369 | Human spermidine/spermine N1-acetyltransferase | 2e-013 | |
| 1949 | Z25749 | H. sapiens gene for ribosomal protein S7 | 2e-013 | |
| 1950 | M96838 | Human proteinase 3 gene, exons 2 and 3. | 2e-013 | |
| 1951 | Z73116 | S. cerevisiae chromosome XII reading frame ORF YLL011w | 2e-013 | |
| 1952 | U90544 | Human sodium phosphate transporter (NPT3) mRNA, | 2e-013 | |
| 1953 | U90544 | Human sodium phosphate transporter (NPT3) mRNA, | 2e-013 | |
| 1954 | AC001016 | Homo sapiens (subclone 2_f8 from P1 H43) DNA sequence | 1e-013 | |
| 1955 | D00596 | Homo sapiens gene for thymidylate synthase, exons 1, 2, 3, | 1e-013 | |
| | | 4, 5, 6, 7, complete cds | | |
| 1956 | X80240 | H. sapiens endogenous retrovirus HERV-KC4 DNA | 1e-013 | |
| 1957 | M86181 | Human prosaposin (PSAP) gene. | 5e-014 | |
| 1958 | V00710 | Human mitochondrial genes for several tRNAs (Phe, Val, | 5e-014 | |
| | | Leu) and 12S and 16S ribosomal RNAs | | |
| 1959 | Z62151 | H. sapiens CpG island DNA genomic Mse1 fragment, clone | 5e-014 | |
| | | 64c7, forward read cpg64c7.ft1a | | |
| 1960 | NM_002187.1 | Homo sapiens interleukin 12B (natural killer cell stimuiatory | 5e-014 | |
| | | factor 2, cytotoxic lymphocyte maturation factor 2, p40) | | |
| | | (IL12B) mRNA > :: gb\|M65290\|HUMNKSFP40 Human | | |
| | | natural killer cell stimulatory factor (NKSF) mRNA, | | |
| 1961 | M18680 | Homo sapiens 5S rRNA pseudogene. | 5e-014 | |
| 1962 | X06274 | Human endogenous retrovirus-like sequence (LTR ERS-P1- | 5e-014 | |
| | | 1) 3′-LTR region | | |
| 1963 | D00835 | Human immunodeficiency virus type 2 proviral DNA, | 5e-014 | |
| | | complete genome | | |
| 1964 | V00581 | Human Alu repetitive located near the insulin gene > | 5e-014 | |
| | | :: gb\|J00268\|HUMINS02 Human insulin gene: repetitive | | |
| | | sequence in 3′ flank. | | |
| 1965 | Z95437 | Human DNA sequence from cosmid A1 on chromosome 6 | 5e-014 | |
| | | contains ESTs. HERV like retroviral sequence | | |
| 1966 | AB001051 | Dugesia japonica mRNA for ADP-ribosylation factor, | 5e-014 | |
| 1967 | AB001051 | Dugesia japonica mRNA for ADP-ribosylation factor, | 5e-014 | |
| 1968 | M59709 | Human carcinoembryonic antigen (CEA) gene, exon 10. | 2e-014 | |
| 1969 | X91233 | H. sapiens IL15 gene | 2e-014 | |
| 1970 | X12718 | Human Retrovirus mRNA for LTR (clone cPB-3) | 2e-014 | |
| 1971 | V00531 | Human interferon genes LeIF-L and LeIF-J and pseudogene | 1e-014 | |
| | | LeIF-M with intergenic regions. These genes are located on | | |
| 1972 | M14292 | Human L1Heg repetitive element from the intergenic region | 1e-014 | |
| | | of the epsilon and G-gamma globin genes. | | |
| 1973 | X56998 | Human UbA52 adrenal mRNA for ubiquitin-52 amino acid | 1e-014 | |
| | | fusion protein | | |
| 1974 | S74906 | E1 beta = pyruvate dehydrogenase beta {promoter} | 8e-015 | |
| 1975 | M18680 | Homo sapiens 5S rRNA pseudogene. | 6e-015 | |
| 1976 | L49046 | Homo sapiens (subclone 2_h3 from P1 H25) DNA sequence. | 6e-015 | |
| 1977 | M18680 | Homo sapiens 5S rRNA pseudogene. | 6e-015 | |
| 1978 | U93037 | Homo sapiens elastin gene, exons 5-27 and alternatively | 6e-015 | |
| | | spliced products, partial cds | | |
| 1979 | M76741 | Homo sapiens biliary glycoprotein (BGP) gene, partial cds. | 6e-015 | |
| 1980 | U72787 | Homo sapiens cosmid clone U163C11 from Xp22.114 22.2, | 6e-015 | |
| | | complete sequence [Homo sapiens] | | |
| 1981 | AB000931 | Homo sapiens FUT2 gene, intron 1, complete sequence | 6e-015 | |
| 1982 | M83137 | Human scaffold-attached region (SAR) DNA. | 6e-015 | |
| 1983 | M18680 | Homo sapiens 5S rRNA pseudogene. | 5e-015 | |
| 1984 | Z63454 | H. sapiens CpG island DNA genomic Mse1 fragment, clone | 5e-015 | |
| | | 84d2, reverse read cpg84d2.rt1a | | |
| 1985 | Z63454 | H. sapiens CpG island DNA genomic Mse1 fragment, clone | 5e-015 | |
| | | 84d2, reverse read cpg84d2.rt1a | | |
| 1986 | X97489 | H. sapiens PIT1/GHF1 gene silencer region | 5e-015 | |
| 1987 | X55367 | Human alpha-satellite DNA from clone pTRA-2 | 2e-015 | |
| 1988 | Z22795 | H. sapiens microsatellite repeat | 2e-015 | |
| 1989 | D38112 | Human mitochondrial DNA, complete sequence | 2e-015 | |
| 1990 | X69951 | H. sapiens gene for casein kinase II alpha subunit subunit | 2e-015 | |
| | | alpha [human, Genomic, 18862 nt] | | |
| 1991 | M59250 | Homo sapiens cytochrome c oxidase subunit Vb | 2e-015 | |
| 1992 | X15965 | Rabbit DNA fbr L1Oc5 repeat | 2e-015 | |
| 1993 | X70052 | S. cerevisiae sof1 gene | 2e-015 | |
| 1994 | M86667 | H. sapiens NAP (nucleosome assembly protein) mRNA, | 1e-015 | |
| 1995 | X78212 | H. sapiens diamine oxidase gene | 7e-016 | |
| 1996 | U21928 | Human fructose-1,6-biphosphatase (FBP1) gene, exon 4 | 7e-016 | |
| 1997 | AB001051 | Dugesia japonica mRNA for ADP-ribosylation factor, | 7e-016 | |
| 1998 | AC002181 | Homo sapiens (subclone 2_a12 from BAC H111) DNA | 6e-016 | |
| 1999 | X91413 | H. sapiens DNA for X-linked dinucleotide repeat | 6e-016 | |
| | | polimorphism (clone YCA3CL149) | | |
| 2000 | U65487 | Human ribosomal RNA upstream binding transcription | 6e-016 | |
| | | factor (UBTF) gene, partial cds | | |
| 2001 | Z69920 | Human DNA sequence from cosmid 91K3, Huntington's | 6e-016 | |
| | | Disease Region, chromosome 4p16.3 | | |
| 2002 | U92818 | Homo sapiens c33.28 unnamed HERV-H protein mRNA, | 6e-016 | |
| 2003 | J03799 | Human colin carcinoma laminin-binding protein mRNA, | 3e-016 | |
| 2004 | Z68885 | Human DNA sequence from cosmid L21F12B, Huntington's | 2e-016 | |
| | | Disease Region, chromosome 4p16.3, contains EST | | |
| 2005 | U75285 | Homo sapiens apoptosis inhibitor survivin gene,complete | 2e-016 | |
| 2006 | M23442 | Human interleukin 4 (IL-4) gene, complete cds. | 2e-016 | |
| 2007 | U18270 | Human thymopoietin (TMPO) gene, exons 4 and 5, and | 2e-016 | |
| | | complete cds for thymopoietin alpha | | |
| 2008 | AD000833 | Homo sapiens DNA from chromosome 19-cosmid f19399 | 2e-016 | |
| | | (˜17 kb EcoRI restriction fragment) | | |
| 2009 | AD000833 | Homo sapiens DNA from chromosome 19-cosmid f19399 | 2e-016 | |
| | | (˜17 kb EcoRI restriction fragment) | | |
| 2010 | Y14823 | Drosophila melanogaster SURF-4 gene and gene encoding | 2e-016 | |
| | | seryl-tRNA synthetase | | |
| 2011 | U67167 | Homo sapiens intestinal mucin (MUC2) gene, promoter | 8e-017 | |
| | | region and partial cds | | |
| 2012 | Z96177 | H. sapiens telomeric DNA sequence, clone 10QTEL040, | 7e-017 | |
| | | 10QTELOO040.seq | | |
| 2013 | AF003533 | Homo sapiens cytosolic phagocyte oxidase protein | 7e-017 | |
| | | (p47phox) gene, promoter region and partial cds | | |
| 2014 | NM_000151.1 | Homo sapiens glucose-6-phosphatase, catalytic glucose-6- | 7e-017 | |
| | | phosphatase mRNA, complete cds. > :: gb\|I15157\|I15157 | | |
| | | Sequence 1 from U.S. Pat. No. 5460942 | | |
| 2015 | X94912 | H. sapiens Pr22 gene | 7e-017 | |
| 2016 | U10580 | Human junction sequence from chimeric/rearranged YAC | 7e-017 | |
| | | yRM2252, chromosome 11p14. | | |
| 2017 | M22970 | Human pancreatic phospholipase A-2 (PLA-2) gene, exons 1 | 7e-017 | |
| 2018 | X02152 | Human mRNA for lactate dehydrogenase-A (LDH-A, EC | 6e-017 | |
| 2019 | Human DNA sequence from cosmid L118D5, Huntington's | 6e-017 | | |
| | | Disease Region, chromosome 4p16.3 | | |
| 2020 | M64804 | Human microsatellite DNA repeat region DNA. > :: | 3e-017 | |
| | | gb\|I31115\|I31115 Sequence 27 from U.S. Pat. No. 5582979 | | |
| 2021 | Z92910 | H. sapiens HFE (HLA-H) gene | 3e-017 | |
| 2022 | X74984 | H. sapiens 5′ flanking region of CD14 gene | 2e-017 | |
| 2023 | U05333 | Mus musculus co-chaperomn ‘cofactor A’ mRNA, complete | 2e-017 | |
| 2024 | U48485 | Human skeletal muscle ryanodine receptor gene | 2e-017 | |
| 2025 | X97869 | H. sapiens gene encoding La autoantigen | 2e-017 | |
| 2026 | X17579 | Human specific H55 DNA | 2e-017 | |
| 2027 | U36445 | Bos taurus calcium-activated chloride channel mRNA, | 2e-017 | |
| 2028 | L06845 | Human cysteinyl-tRNA synthetase mRNA, partial cds. | 2e-017 | |
| 2029 | X93334 | H. sapiens mitochondrial DNA, complete genome | 8e-018 | |
| 2030 | X62996 | H. sapiens mitochondrial genome (consensus sequence) | 8e-018 | |
| 2O31 | M98479 | Human transglutaminase mRNA, 3′ untranslated region. | 8e-018 | |
| 2032 | L42568 | Homo sapiens (clone 1SW11-1) non-gastric H, K-ATPase | 8e-018 | |
| | | (ATP1AL1) gene, exons 15-17 | | |
| 2033 | S52659 | lactoferrin {5′ region, promoter} [human, placenta, | 8e-018 | |
| 2034 | U66707 | Rattus norvegicus densin-180 mRNA, complete cds | 8e-018 | |
| 2035 | X76683 | Plasmid vector pHM2 betalactamase gene | 3e-018 | |
| 2036 | U66707 | Rattus norvegicus densin-180 mRNA, complete cds | 3e-018 | |
| 2037 | D17201 | Human HepG2 3′ region MboI cDNA, clone hmd3d04m3 | 3e-018 | |
| 2038 | Z24281 | H. sapiens (D12S355) DNA segment containing | 2e-018 | |
| 2039 | AC001443 | Homo sapiens (subclone 2_f10 from BAC 2913 | 2e-018 | |
| 2040 | U73522 | Homo sapiens AMSH mRNA, complete cds | 1e-018 | |
| 2041 | L77040 | Homo sapiens (subclone 8_c11 from P1 H22) DNA | 9e-019 | |
| 2042 | X93496 | H. sapiens TRAP gene, 5′ flanking region | 9e-019 | |
| 2043 | X54816 | Human gene for alpha-1-microglobulin-bikunin, exons 1-5 | 9e-019 | |
| | | (encoding alpha-1-microglobulin, N-terminus.) | | |
| 2044 | L35240 | Human enigma gene, complete cds | 8e-019 | |
| 2045 | Z46940 | H. sapiens PRM1 gene, PRM2 gene and TNP2 gene | 8e-019 | |
| 2046 | U60801.1 | Human poly(A)-binding protein (PABP) processed | 8e-019 | |
| | | pseudogene2, complete cds | | |
| 2047 | NM_002484.1 | Homo sapiens nucleotide binding protein 1 Human | 4e-019 | |
| | | nucleotide-binding protein mRNA, complete cds. | | |
| 2048 | X76683 | Plasmid vector pHM2 betalactamase gene | 3e-019 | |
| 2049 | U40369 | Human spermidine/spermine N1-acetyltransferase | 3e-019 | |
| 2050 | D13624 | Human Wilms tumor gene encoding WT1 protein, exon 6 | 3e-019 | |
| 2051 | D13624 | Human Wilms tumor gene encoding WT1 protein, exon 6 | 3e-019 | |
| 2052 | D86566 | Human DNA for NOTCH4, partial cds | 3e-019 | |
| 2053 | U72787 | Homo sapiens cosmid clone U163C11 from Xp22.1-22.2, | 3e-019 | |
| | | complete sequence [Homo sapiens] | | |
| 2054 | U86759 | Human netrin-2 like protein (NTN21) mRNA, complete cds | 3e-019 | |
| 2055 | X78454 | X. laevis AB21 for RPD3 homologue | 3e-019 | |
| 2056 | NM_000969.1 | Homo sapiens ribosomal protein L5 (RPL5) mRNA | 1e-019 | |
| 2057 | U49869 | Human ubiquitin gene, complete cds | 1e-019 | |
| 2058 | X78901 | H. sapiens (lambda63) DNA of apolipoprotein cluster | 9e-020 | |
| 2059 | U32515 | Human putative tumor suppressor (MXI1) gene, exons 4, 5, | 9e-020 | |
| | | and 6, and complete cds | | |
| 2060 | D87717 | Human mRNA for KIAA0013 gene, complete cds | 5e-020 | |
| 2061 | Z68758 | Human DNA sequence from cosmid cN85E10 on | 3e-020 | |
| | | chromosome 22q11.2-qter | | |
| 2062 | Z30584 | R. norvegicus (wistar) mRNA for ZG-16p | 3e-020 | |
| 2063 | Z68758 | Human DNA sequence from cosmid cN85E10 on | 3e-020 | |
| | | chromosome 22q11.2-qter | | |
| 2064 | M58600 | Human heparin cofactor II (HCF2) gene, exons 1 through 5. | 3e-020 | |
| 2065 | U93037 | Homo sapiens elastin gene, exons 5-27 and alternatively | 3e-020 | |
| | | spliced products, partial cds | | |
| 2066 | L38951 | Homo sapiens importin beta subunit mRNA, complete cds | 2e-020 | |
| 2067 | D26141 | Human NF1 gene homologue | 1e-020 | |
| 2068 | M18796 | Orangutan beta- and delta-globin gene intergenic region with | 1e-020 | |
| | | 2 Alu repeats. | | |
| 2069 | Z47046 | Human cosmid QLL2C9 from Xq28 | 1e-020 | |
| 2070 | AC001443 | Homo sapiens pl (subclone 2_f10 from BAC 2913 | 1e-020 | |
| 2071 | X15965 | Rabbit DNA for L1Oc5 repeat | 1e-020 | |
| 2072 | U86453 | Human phosphatidylinositol 3-kinase catalytic subunit | 6e-021 | |
| | | p110delta mRNA, complete cds | | |
| 2073 | M90058 | Human serglycin gene, exons 1, 2, and 3. | 4e-021 | |
| 2074 | L81932 | Homo sapiens (subclone 9_h2 from P1 H21) DNA sequence | 4e-021 | |
| 2075 | X68258 | Bicistronic transcription units (pSBC-2) | 3e-021 | |
| 2076 | L78777 | Homo sapiens (subclone 2_b8 from P1 H49) DNA sequence | 3e-021 | |
| 2077 | J01415 | Human mitochondrion, complete genome | 1e-021 | |
| 2078 | L43411 | Homo sapiens (subclone 5_g5 from P1 H25) DNA sequence. | 1e-021 | |
| 2079 | NM_000967.1 | Homo sapiens ribosomal protein L3 (RPL3) mRNA protein | 1e-021 | |
| 2080 | Z81014 | Human DNA sequence from cosmid U65A4, between | 1e-021 | |
| | | markers DXS366 and DXS87 on chromosome X * | | |
| 2081 | U93037 | Homo sapiens elastin gene, exons 5-27 and altematively | 1e-021 | |
| | | spliced products, partial cds | | |
| 2082 | X78454 | X. laevis AB21 mRNA for RPD3 homologue | 1e-021 | |
| 2083 | X82825 | A. thaliana PRL1 mRNA | 1e-021 | |
| 2084 | J01415 | Human mitochondrion, complete genome | 4e-022 | |
| 2085 | Z68885 | DNA sequence from cosmid L21F12B, Huntington's | 4e-022 | |
| | | Disease Region, chromosome 4p16.3, contains EST | | |
| 2086 | L81690 | Homo sapiens (subclone 1_c2 from P1 H56) DNA sequence | 4e-022 | |
| 2087 | Z7046 | Human cosmid QLL2C9 from Xq28 | 4e-022 | |
| 2088 | Z73360 | Human DNA sequence from cosmid 92M18, BRCA2 gene | 1e-022 | |
| | | region chromosome 13q12-13 | | |
| 2089 | L78776 | Homo sapiens (subclone 2_a7 from P1 H49) DNA sequence | 1e-022 | |
| 2090 | Z96210 | H. sapiens telomeric DNA sequence, clone 12PTEL057, read | 5e-023 | |
| | | 12PTELOO057.seq | | |
| 2091 | Z50751 | H. sapiens mRNA for B4B | 4e-023 | |
| 2092 | U14567 | ***ALU WARNING: Human Alu-J subfamily consensus | 4e-023 | |
| 2093 | L35657 | Homo sapiens (subclone H85 a_a10 from P1 35 H5 C8) DNA | 4e-023 | |
| 2094 | Z81315 | Human DNA sequence from fosmid F62D4 on chromosome | 4e-023 | |
| | | 22q12-qter > :: emb\|Z81316\|HSF62D4A Human DNA | | |
| | | sequence from fosmid F62D4 on chromosome 22, complete | | |
| 2095 | U93237 | Human menin (MEN 1) gene, complete cds | 1e-023 | |
| 2096 | M16660 | Human 90-kDa heat-shock protein gene, cDNA, complete | 1e-023 | |
| 2097 | Z93943 | Human DNA sequence from cosmid U235H3 on | 6e-024 | |
| 2098 | M84334 | Macacca mulatta hnRNP A1-gamma isoform mRNA, | 5e-024 | |
| 2099 | Z73360 | Human DNA sequence from casmid 92M18, BRCA2 gene | 5e-024 | |
| | | region chromosome 13q12-13 | | |
| 2100 | L32754 | Homo sapiens Ig-associated signalling molecule | 5e-024 | |
| 2101 | AC002252 | Homo sapiens (subclone 1_g7 from BAG H76) DNA | 5e-024 | |
| 2102 | NM_000982.1 | Homo sapiens ribosomal protein L21 (RPL21) mRNA > :: | 5e-024 | |
| | | gb\|U25789\|HSU25789 Human ribosomal protein L21 | | |
| | | mRNA, complete cds. | | |
| 2103 | NM_000397.1 | Homo sapiens cytochrome b-245, beta polypeptide encoding | 5e-024 | |
| | | mitochondrial protein, mRNA > :: emb\|X04011\|HSXCGD | | |
| | | Human mRNA of X-CGD gene involved in chronic | | |
| | | granulomatous disease located on chromosome X | | |
| 2104 | L19086 | Human LINE1 (L1.3) repetitive element DNA sequence. 4e-024 | | |
| 2105 | U88531 | Bos taurus phosphatidylinositol 4-kinase mRNA, complete | 2e-024 | |
| 2106 | D38112 | Human mitochondrial DNA, complete sequence | 2e-024 | |
| 2107 | NM_003011.1 | Homo sapiens SET translocation (myeloid leukemia- | 2e-024 | |
| | | associated) (SET) mRNA > :: gb\|M93651\|HUMSET Human | | |
| 2108 | M98512 | Human NFG genomic fragment. | 2e-024 | |
| 2109 | NM_001019.1 | Homo sapiens ribosomal protein S15a for ribosomal protein | 2e-024 | |
| 2110 | X70991 | H. sapiens MADER mRNA | 2e-024 | |
| 2111 | X14445 | Human int-2 proto-oncogene | 2e-024 | |
| 2112 | AC001174 | Homo sapiens (subclone 1_e2 from BAG H94) DNA | 2e-024 | |
| 2113 | D86566 | Human DNA for NOTCH4, partial cds | 2e-024 | |
| 2114 | Z78885 | H. sapiens flow-sorted chromosome 6 HindIII fragment, 1e-024 | | |
| 2115 | Z82272 | Human endogenous retrovirus env mRNA | 1e-024 | |
| 2116 | Z96167 | H. sapiens telomeric DNA sequence, clone 10QTEL017, | 6e-025 | |
| | | read 10QTELOO017.seq | | |
| 2117 | L38951 | Homo sapiens importin beta subunit mRNA, complete cds | 6e-025 | |
| 2118 | X53575 | Yeast RPL7 gene for ribosmal protein L7 | 6e-025 | |
| 2119 | L77040 | Homo sapiens (subclone 8_c11 from P1 H22) DNA | 5e-025 | |
| 2120 | Z23957 | H. sapiens (D2S336) DNA segment containing (CA) repeat; | 5e-025 | |
| | | clone AFM275yf5; single read | | |
| 2121 | X14445 | Human int-2 proto-oncogene | 5e-025 | |
| 2122 | L39062 | Homo sapiens interleukin 9 receptor IL9R pseudogene, | 2e-025 | |
| 2123 | Z84723 | Human DNA sequence from phage LAW2 from a contig | 2e-025 | |
| | | from the tip of the short arm of chromosome 16, spanning | | |
| | | 2 MB of 16p13.3 Contains Interleukin 9 receptor pseudogene | | |
| 2124 | AC001174 | Homo sapiens (subclone 1_e2 from BAC H94) DNA | 2e-025 | |
| 2125 | NM_001423.1 | Homo sapiens epithelial membrane protein 1 Progression | 2e-025 | |
| | | Associated Protein | | |
| 2126 | X14445 | Human int-2 proto-oncogene | 2e-025 | |
| 2127 | M68841 | Human L1 repetitive sequence with a region homologous to | 2e-025 | |
| | | a mouse ORF. | | |
| 2128 | X97489 | H. sapiens PIT1/GHF1 gene silencer region | 2e-025 | |
| 2129 | X73501 | H. sapiens gene for cytokeratin 20 | 1e-025 | |
| 2130 | U8363 | Mus musculus transcriptional activator alpha-NAG | 1e-025 | |
| 2131 | X01037 | Human 7SL RNA sequence | 7e-026 | |
| 2132 | M22485 | Human ring chromosome 21 [r(21)] breakpoint DNA. | 2e-026 | |
| 2133 | K03429 | Ape (chlmpanzee) 28S ribosomal RNA gene. | 2e-026 | |
| 2134 | AF053644 | Homo sapiens cellular apoptosis susceptibility protein | 9e-027 | |
| | | (CSE1) gene, exon 2 | | |
| 2135 | L06900 | Human dystrophin gene, intron 1 containing pseudo exon. | 7e-027 | |
| 2136 | U18271 | Human thymopoietin (TMPO) gene, partial exon 6, | 7e-027 | |
| | | complete exon 7, partial exon 8, and partial cds for | | |
| 2137 | X05323 | Human MRC OX-2 gene signal sequence | 7e-027 | |
| 2138 | M99065 | Rat core histone (MacroH2A.1) mRNA, complete cds. | 7e-027 | |
| 2139 | X01037 | Human 7SL RNA sequence | 6e-027 | |
| 2140 | M22485 | Human ring chromosome 21 [r(21)] breakpoint DNA. | 2e-027 | |
| 2141 | D50494 | Mouse mRNA for murine RCK, complete cds | 2e-027 | |
| 2142 | M14292 | Human L1Heg repetitive element from the intergenic region | 2e-027 | |
| | | of the epsilon and G-gamma globin genes. | | |
| 2143 | U72787 | Homo sapiens cosmid clone U163C11 from Xp22.1-22.2, | 7e-028 | |
| | | complete sequence [Homo sapiens ] | | |
| 2144 | NM_001030.1 | Homo sapiens ribosomal protein S27 gb\|L19739\|HUMMPSI | 7e-028 | |
| | | Homo sapiens metallopanstimul (MPS1) mRNA, complete | | |
| | | cds. > :: gb\|I60224\|I60224 Sequence 1 from patent US | | |
| 2145 | AC002186 | Homo sapiens (subclone 1_f12 from P1 H115) DNA | 7e-028 | |
| 2146 | M22485 | Human ring chromosome 21 [r(21)] breakpoint DNA. | 3e-028 | |
| 2147 | Z95437 | Human DNA sequence from cosmid A1 on chromosome 6 | 2e-028 | |
| | | contains ESTs. HERV like retroviral sequence | | |
| 2148 | NM_001025.1 | Homo sapiens ribosomal protein S23 (RPS23) mRNA > :: | 2e-028 | |
| | | dbj\|D14530\|HUMRSPT Human homolog of yeast ribosomal | | |
| | | protein S28, complete cds | | |
| 2149 | Z95437 | Human DNA sequence from cosmid A1 on chromosome 6 | 2e-028 | |
| | | contains ESTs. HERV like retroviral sequence | | |
| 2150 | Z62151 | H. sapiens CpG island DNA genomic Mse1 fragment, clone | 1e-028 | |
| | | 64c7, forward read cpg64c7.ft1a | | |
| 2151 | Z62151 | H. sapiens CpG island DNA genomic Mse1 fragment, clone | 8e-029 | |
| | | 64c7, forward read cpg64c7.ft1a | | |
| 2152 | X62996 | H. sapiens mitochondrial genome (consensus sequence) | 8e-029 | |
| 2153 | Z62151 | H. sapiens CpG island DNA genomic Mse1 fragment, clone | 8e-029 | |
| | | 64c7,forward read cpg64c7.ft1a | | |
| 2154 | AC001518 | Homo sapiens (subclone 2_b4 from P1 H49) DNA sequence | 8e-029 | |
| 2155 | X56932 | H. sapiens mRNA for 23 kD highly basic protein | 8e-029 | |
| 2156 | U93563 | Human L1 element L1.6 putative p150 gene, complete cds | 8e-029 | |
| 2157 | Z96282 | H. sapiens telomeric DNA sequence, clone 13QTEL058, | 8e-029 | |
| | | read 13QTELOO05.seq | | |
| 2158 | NM_002892.1 | Homo sapiens retinoblastoma-binding protein 1 (RBBP1) | 7e-029 | |
| | | mRNA > :: gb\|S66427\|S66427 RBP1 = retinoblastoma | | |
| | | binding protein 1 [human, Nalm-6 pre-B cell leukemia, | | |
| 2159 | M12855 | Human endogenous retrovirus DNA downstream of 5′ LTR, | 3e-029 | |
| | | clone HERV-K22. | | |
| 2160 | X86012 | Human DNA sequence from intron 22 of the factor VIII | 3e-029 | |
| | | gene, Xq28. Contains the end of a 9.5 kb repeated region, | | |
| | | int22h-1, involved in many cases of haemophilia | | |
| 2161 | L81840 | Homo sapiens (subclone 1_f8 from P1 H43) DNA sequence | 3e-029 | |
| 2162 | Z11711 | H. sapiens gene for alpha-2 macroglobulin, exon 1 | 3e-029 | |
| 2163 | X61453 | M. musculus mRNA for H19 clone | 3e-029 | |
| 2164 | NM_003389.1 | Homo sapiens WD repeat domain 2 (WDR2) mRNA > | 1e-029 | |
| 2165 | L81840 | Homo sapiens (subclone 1_fB from P1 H43) DNA sequence | 9e-030 | |
| 2166 | L05173 | Homo sapiens chromosome 21 DNA fragment with Alu, L1 | 8e-030 | |
| | | and O repetitive elements. | | |
| 2167 | M12855 | Human endogenous retrovirus DNA downstream of 5′ LTR, | 3e-030 | |
| | | clone HERV-K22. | | |
| 2168 | M12855 | Human endogenous retrovirus DNA downstream of 5′ LTR, | 3e-030 | |
| | | clone HERV-K22. | | |
| 2169 | J05211 | Human desmoplakin mRNA, 3′ end. | 3e-030 | |
| 2170 | Z96167 | H. sapiens telomeric DNA sequence, clone 10QTEL017, | 3e-030 | |
| | | read 10QTELOO017.seq | | |
| 2171 | M12855 | Human endogenous retrovirus DNA downstream of 5′ LTR, | 3e-030 | |
| | | clone HERV-K22. | | |
| 2172 | AC002186 | Homo sapiens (subclone 1_f12 from P1 H115) DNA | 3e-030 | |
| 2173 | L35657 | Homo sapiens (subclone H8 5_a10 from P1 35 H5 C8) DNA | 3e-030 | |
| 2174 | L35657 | Homo sapiens (subclone H8 5_a10 from P1 35 H5 C8) DNA | 3e-030 | |
| 2175 | L39061 | Homo sapiens transcription factor SL1 mRNA, partial cds. | 3e-030 | |
| 2176 | AF010313 | Homo sapiens Pig8 (PIG8) mRNA, complete cds | 1e-030 | |
| 2177 | AC001443 | Homo sapiens (subclone 2_f10 from BAC 2913 | 1e-030 | |
| 2178 | Z62151 | H. sapiens CpG island DNA genomic Mse1 fragment, clone | 3e-031 | |
| | | 64c7, forward read cpg64c7.ft1a | | |
| 2179 | AF010312 | Homo sapiens Pig7 (PIG7) mRNA, complete cds | 1e-031 | |
| 2180 | U77085 | Human epithelial membrane protein (CL-20) mRNA, | 1e-031 | |
| 2181 | D29805 Human mRNA for beta-1,4-galactosyltransferase, complete | 1e-031 | | |
| 2182 | Z95437 | Human DNA sequence from cosmid A1 on chromosome 6 | 1e-031 | |
| | | contains ESTs. HERV like retroviral sequence | | |
| 2183 | X62996 | H. sapiens mitochondrial genome (consensus sequence) | 1e-031 | |
| 2184 | U80409 | Lactococcus lactis cremoris glucose inhibited division | 4e-032 | |
| | | protein homolog GidA (gidA) gene, partial cds | | |
| 2185 | X00525 | Mouse 28S ribosomal RNA | 1e-032 | |
| 2186 | U35032 | Human endogenous retrovirus clone c5.11, HERV-H | 1e-032 | |
| | | multiply spliced subgenomic leader, protease and integrase | | |
| 2187 | Z75894 | Human DNA sequence from cosmid U61F10, between | 1e-032 | |
| | | markers DXS366 and DXS87 on chromosome X contains | | |
| 2188 | U22055 | Human 100 kDa coactivator mRNA, complete cds. | 1e-032 | |
| 2189 | M98509 | Human NFB genomic fragment. | 5e-033 | |
| 2190 | D38112 | Human mitochondrial DNA, complete sequence | 2e-033 | |
| 2191 | Z69364 | Human DNA sequence from cosmid L96F8, Huntington's | 5e-034 | |
| | | Disease Region, chromosome 4p16.3 contains EST and | | |
| | | cDNA > :: emb\|Z69365\|HSL96F8A Human DNA sequence | | |
| | | from cosmid L96F8, Huntington's Disease Region, | | |
| | | chromosome 4p16.3 contains EST and cDNA | | |
| 2192 | U59695 | Human apurinic/apyrimidinic endonuclease (HAP1) gene, 5′ | 5e-034 | |
| | | upstream region | | |
| 2193 | L35657 | Homo sapiens (subclone H8 5_a10 from P1 35 H5 C8) DNA | 2e-034 | |
| 2194 | L78778 | Homo sapiens (subclone 2_e10 from P1 H49) DNA | 2e-034 | |
| 2195 | V00662 | H. sapiens mitochondrial genome | 5e-035 | |
| 2196 | M30629 | Human pregnancy-specific glycoprotein beta-1 | 5e-035 | |
| 2197 | NM_003134.1 | Homo sapiens signal recognition particle 14 kD (homologous | 5e-035 | |
| | | Alu RNA-binding protein) (SRP14) mRNA > recognition | | |
| 2198 | U93572 | Human L1 element L1.25 p40 and putative p150 genes, | 2e-035 | |
| 2199 | Z96176 | H. sapiens telomeric DNA sequence, clone 10QTEL038, | 6e-036 | |
| | | read 10QTELOO038.seq | | |
| 2200 | V00710 | Human mitochondrial genes for several tRNAs (Phe, Val, | 6e-036 | |
| | | Leu) and 12S and 16S ribosomal RNAs | | |
| 2201 | Z78715 | H. sapiens flow-sorted chromosome 6 HindIII fragment, | 5e-036 | |
| 2202 | U93574 | Human L1 element L1.39 p40 and putative p150 genes, | 2e-036 | |
| 2203 | S63912 | D10S102 = FBRNP [human, fetal brain, mRNA, 3043 nt] | 1e-036 | |
| 2204 | AB011137 | Homo sapiens mRNA for KIAA0565 protein, complete cds | 1e-036 | |
| 2205 | Z55370 | H. sapiens CpG island DNA genomic Mse1 fragment, clone | 7e-037 | |
| | | 37a7, forward read cpg37a7.ft1a | | |
| 2206 | L36720 | Homo sapiens bystin mRNA, complete cds | 7e-037 | |
| 2207 | S45936 | HTS1 = HeLa tumor suppressor gene [human, revertant clone | 7e-037 | |
| | | F2, mRNA Partial, 2687 nt] | | |
| 2208 | U36755 | Human thrombin receptor (F2R) gene, 5′ region and partial | 6e-037 | |
| 2209 | D50694 | Rattus norvegicus mRNA for proteasomal ATPase | 3e-037 | |
| 2210 | AB001325 | Human AQP3 gene for aquaporine 3 (water channel), partail | 2e-037 | |
| 2211 | L35657 | Homo sapiens (subclone H8 5_a10 from P1 35 H5 C8) DNA | 2e-037 | |
| 2212 | U36445 | Bos taurus calcium-activated chloride channel mRNA, | 2e-037 | |
| 2213 | X66292 | P. pygmaeus (OX3910-11) alphoid repetitive DNA | 7e-038 | |
| 2214 | D38112 | Human mitochondrial DNA, complete sequence | 6e-038 | |
| 2215 | Z16571 | H. sapiens (D12S80) DNA segment containing (CA) repeat; | 6e-038 | |
| | | clone AFM102xd6; single read | | |
| 2216 | D50561 | Human DNA, replication enhancing element (REE1) | 3e-038 | |
| 2217 | X66292 | P. pygmaeus (OX3910-11) alphoid repetitive DNA | 8e-039 | |
| 2218 | Z73360 | Human DNA sequence from cosmid 92M18, BRCA2 gene | 7e-039 | |
| | | region chromosome 13q12-13 | | |
| 2219 | M25718 | Human rDNA and 4 Alu repeats. | 4e-039 | |
| 2220 | NM_000397.1 | Homo sapiens cytochrome b-245, beta polypeptide encoding | 3e-039 | |
| | | mitochondrial protein, mRNA > :: emb\|X04011\|HSXCGD | | |
| | | Human mRNA of X-CGD gene involved in chronic | | |
| | | granulomatous disease located on chromomosome X | | |
| 2221 | M13073 | Human metallothionein I processed pseudogene, complete | 2e-039 | |
| 2222 | Z78715 | H. sapiens flow-sorted chromosome 6 HindIII fragment, | 3e-040 | |
| 2223 | U72787 | Homo sapiens cosmid clone U163C11 from Xp22.1-22.2, | 3e-040 | |
| | | complete sequence [Homo sapiens] | | |
| 2224 | Z12962 | H. sapiens mRNA for homologue to yeast ribosomal protein | 3e-040 | |
| 2225 | Z78715 | H. sapiens flow-sorted chromosome 6 HindIII fragment, | 9e-041 | |
| 2226 | AC001443 | Homo sapiens (subclone 2_f10 from BAC 2913 | 4e-041 | |
| 2227 | Z73360 | Human DNA sequence from cosmid 92M18, BRCA2 gene | 3e-041 | |
| | | region chromosome 13q12-13 | | |
| 2228 | S72304 | rah = ras-related homolog [mice, HT4 neural cell line, | 3e-041 | |
| 2229 | AC001443 | Homo sapiens (subclone 2_f10 from BAG 2913 | 1e-041 | |
| 2230 | U49974 | Human mariner2 transposable element, complete consensus | 1e-041 | |
| 2231 | L26507 | Mouse myocyte nuclear factor (MNF) mRNA, complete cds. | 1e-041 | |
| 2232 | U08191 | Human R kappa B mRNA, complete cds. | 1e-042 | |
| 2233 | D11078 | Homo sapiens RGH2 gene, retrovirus-like element | 1e-042 | |
| 2234 | U83908 | Human nuclear antigen H731 mRNA, complete cds | 1e-042 | |
| 2235 | X63209 | B. taurus CI-ASHI mRNA for ubiquinone oxidoreductase | 1e-042 | |
| 2236 | NM_002743.1 | Homo sapiens protein kinase C substrate 80K-H (PRKCSH) | 1e-042 | |
| | | mRNA > :: gb\|J03075\|HUMG19P1A Human 80K-H protein | | |
| | | (kinase C substrate) mRNA, complete cds. | | |
| 2237 | L78777 | Homo sapiens (subclone 2_b8 from P1 H49) DNA sequence | 4e-043 | |
| 2238 | Z59382 | H. sapiens CpG island DNA genomic Mse1 fragment, clone | 1e-043 | |
| | | 152b10, reverse read cpg152b10.rt1a | | |
| 2239 | L124694 | Gallus gallus (max) gene, complete cds. | 1e-043 | |
| 2240 | U72789 | Homo sapiens cosmid clone U197H5 from Xp22.1-22.2, | 5e-044 | |
| | | complete sequence [Homo sapiens] | | |
| 2241 | AF004161 | Oryctolagus cuniculus peroxisomal Ca-dependent solute | 5e-044 | |
| | | carriet mRNA, complete cds | | |
| 2242 | M22485 | Human ring chromosome 21 [r(21)] breakpoint DNA. | 2e-044 | |
| 2243 | Z60212 | H. sapiens CpG island DNA genomic Mse1 fragment, clone | 2e-045 | |
| | | 195c8, forward read cpg195c8.ft1a | | |
| 2244 | M22485 | Human ring chromosome 21 [r(21)] breakpoint DNA. | 2e-045 | |
| 2245 | AF004161 | Oryctolagus cuniculus peroxisomal Ca-dependent solute | 2e-045 | |
| | | carrier mRNA, complete cds | | |
| 2246 | D38112 | Human mitochondrial DNA,complete sequence | 1e-045 | |
| 2247 | U72787 | Homo sapiens cosmid clone U163C11 from Xp22.1-22.2, | 6e-046 | |
| | | complete sequence [Homo sapiens ] | | |
| 2248 | Z69925 | Human DNA sequence from cosmid cN116A5, on | 5e-046 | |
| | | chromosome 22q12-qter contains exon trap | | |
| 2249 | U12404 | Human Csa-19 mRNA, complete cds. | 5e-046 | |
| 2250 | Y07969 | H. sapiens mRNA for APRIL protein | 2e-046 | |
| 2251 | X90583 | H. sapiens mRNA for rat translocon-associated protein delta | 2e-046 | |
| 2252 | L35657 | Homo sapiens (subclone H8 5_a10 from P1 35 H5 C8) DNA | 2e-046 | |
| 2253 | NM_001762.1 | Homo sapiens chaperonin containing T-complex subunit 6 | 2e-046 | |
| | | (CCT6) mRNA > :: gb\|L27706\|HUMTCP20 Human | | |
| | | chaperonin protein (Tcp20) gene complete cds. | | |
| 2254 | AF008563 | Kluyveromyces lactis centromere-binding factor 5 | 7e-047 | |
| 2255 | NM_002137.1 | Homo sapiens heterogeneous nuclear ribonucleoprotein | 5e-047 | |
| | | A2/B1 (HNRPA2B1) mRNA > :: | | |
| | | gb\|M29065\|HUMRNPA2A Human hnRNP A2 protein | | |
| 2256 | NM_001866.1 | Homo sapiens cytochrome c oxidase subunit VIIb (COX7B), | 3e-047 | |
| | | nuclear gene encoding mitochondrial protein, mRNA > :: | | |
| | | emb\|Z14244\|HSCOX7BM H. sapiens coxVIIb mRNA for | | |
| | | cytochrome c oxidase subunit VIIb | | |
| 2257 | Z55938 | H. sapiens CpG island DNA genomic Mse1 fragment, clone | 2e-047 | |
| | | 74a1, reverse read cpg74a1.rt1a | | |
| 2258 | U31278 | Homo sapiens mitotic feedback control protein Madp2 | 2e-047 | |
| | | homolog mRNA, complete cds | | |
| 2259 | U72787 | Homo sapiens cosmid clone U163C11 from Xp22.1-22.2, | 2e-047 | |
| | | complete sequence [Homo sapiens] | | |
| 2260 | NM_003295.1 | Homo sapiens tumor protein, translationally-controlled 1 | 7e-048 | |
| | | (TPT1) mRNA > :: emb\|X16064\|HSTUMP Human mRNA | | |
| | | for translationally controlled tumor protein | | |
| 2261 | NM_003503.1 | Homo sapiens CDC7 (cell division cycle 7, S. cerevisiae, | 3e-048 | |
| | | homolog)-like 1 (CDC7L1) mRNA, and translated products > | | |
| | | :: gb\|AF015592\|AF015592 Homo sapiens Cdc7 | | |
| 2262 | Z62151 | H. sapiens CpG island DNA genomic Mse1 fragment, clone | 2e-048 | |
| | | 64c7, forward read cpg64c7.ft1a | | |
| 2263 | L11877 | Homo sapiens dUTP nucleotidohydrolase mRNA, 5′ end. 8e-049 | | |
| 2264 | L40403 | Homo sapiens (clone zap3) mRNA, 3′ end of cds | 3e-049 | |
| 2265 | M81600 | Human NAD(P)H:quinone oxireductase gene, exon 6 > | 2e-049 | |
| 2266 | U72787 | Homo sapiens clone U163C11 from Xp22.1-22.2, | 8e-050 | |
| | | complete sequence [Homo sapiens] | | |
| 2267 | M31004 | Human nuclear phosphoprotein B23 mRNA, clone hpB2. | 8e-050 | |
| 2268 | Z97207 | Mus musculus mRNA for B-IND1 protein | 8e-050 | |
| 2269 | AF007775 | Rattus norvegicus aquaporin-pancreas and liver | 3e-650 | |
| 2270 | U72787 | Homo sapiens cosmid clone U163C11 from Xp22.1-22.2 | 9e-051 | |
| | | complete sequence [Homo sapiens ] | | |
| 2271 | U72787 | Homo sapiens cosmid clone U163C11 from Xp22.1-22.2, | 9e-051 | |
| | | complete sequence [Homo sapiens] | | |
| 2272 | X06683 | Mouse mRNA for Cu-Zn superoxide dismutase (EC | 9e-051 | |
| | | 1.15.1.1) > :: gb\|M35725\|MUSCZSOD Mouse Cu-Zn | | |
| | | superoxide dismutase mRNA, cornplete cds. | | |
| 2273 | X93334 | H. sapiens mitochondrial DNA, complete genome | 3e-051 | |
| 2274 | U27197 | Drosophila melanogaster pelota (pelo) mRNA, complete cds | 3e-051 | |
| 2275 | D87953 | Human mRNA for RTP, complete cds | 1e-051 | |
| 2276 | L81869 | Homo sapiens (subclone 1_c4 from P1 H55) DNA sequence | 4e-052 | |
| 2277 | D63876 | Human mRNA for KIAA0154 gene, partial cds | 4e-052 | |
| 2278 | D14659 | Human mRNA for KIAA0103 gene, complete cds | 3e-052 | |
| 2279 | X93334 | H. sapiens mitochondrial DNA, complete genome | 4e-053 | |
| 2280 | D38112 | Human mitochondrial DNA, complete sequence | 4e-053 | |
| 2281 | U97519 | Homo sapiens podocalyxin-like protein mRNA, complete | 4e-053 | |
| 2282 | L35657 | Homo sapiens (subclone H8 5_a10 from P1 35 H5 C8) DNA | 4e-053 | |
| 2283 | D63876 | Human mRNA for KIAA0I54 gene, partial cds | 4e-053 | |
| 2284 | D38112 | Human mitochondrial DNA, complete sequence | 1e-053 | |
| 2285 | Z57342 | H. sapiens CpG island DNA genomc Mse1 fragment, clone | 1e-053 | |
| | | 172a12, forward read cpg172a12.ft1a | | |
| 2286 | Z64479 | H. sapiens CpG island DNA genomic Mse1 fragment, clone | 1e-053 | |
| | | 127c4, reverse read cpg127c4.rt1a | | |
| 2287 | M28209 | Homo sapiens GTP-binding protein (RAB1) mRNA, | 1e-053 | |
| 2288 | S57803 | Ro60 protein gene [human, mRNA Partial, 176 nt, segment | 4e-054 | |
| 2289 | U01139 | Mus musculus B6D2F1 clone 2C1IB mRNA. | 1e-054 | |
| 2290 | U72787 | Homo sapiens cosmid clone U163C11 from Xp22.1-22.2, | 1e-054 | |
| | | complete sequence [Homo sapiens] | | |
| 2291 | M16553 | Human tissue factor mRNA, complete cds, with an Alu | 5e-055 | |
| | | repeat in the 3′ untranslated region. | | |
| 2292 | D10522 | Homo sapiens mRNA for 80K-L protein, complete cds | 5e-055 | |
| 2293 | Z71621 | H. sapiens Wnt-13 mRNA | 5e-055 | |
| 2294 | M81104 | Human CD34 mRNA, complete cds. | 4e-055 | |
| 2295 | D29805 | Human mRNA for beta-1,4-galactosyltransferase, complete | 2e-055 | |
| 2296 | X04299 | Human mRNA for liver alcohol dehydrogenase (EC 1.1.1.1) | 2e-055 | |
| | | gamma 2 subunit from ADH3 locus | | |
| 2297 | U57715 | Rattus norvegicus FGF receptor activating protein FRAG1 | 2e-055 | |
| | | (FRAG1) mRNA, complete cds | | |
| 2298 | NM_003150.1 | Homo sapiens signal transducer and activator of | 2e-056 | |
| | | transcription 3 (acute-phase response factor) (STAT3) | | |
| | | mRNA > :: gb\|L29277\|HUMAPRF Homo sapiens DNA- | | |
| | | binding protein (APRF) mRNA, complete cds. > :: | | |
| 2299 | X56974 | M. musculus mRNA for external transcribed spacer | 2e-057 | |
| 2300 | U62435 | Human nicotinic acetylcholine receptor alpha6 subunit | 2e-057 | |
| | | precursor, mRNA, complete cds | | |
| 2301 | Z63454 | H. sapiens CpG island DNA genomic Mse1 fragment, clone | 6e-058 | |
| | | 84d2, reverse read cpg84d2.rt1a | | |
| 2302 | U34994 | Human DNA-dependent protein kinase catalytic subunit | 6e-058 | |
| 2303 | Z60432 | H. sapiens CpG island DNA genonuc Mse1 fragment, clone | 2e-058 | |
| | | 22h4, reverse read cpg22h4.rt1a | | |
| 2304 | U83590 | Rattus norvegicus PAR interacting protein mRNA, complete | 2e-058 | |
| 2305 | U83590 | Rattus norvegicus PAR interacting protein mRNA, complete | 2e-058 | |
| 2306 | M28449 | Mouse Hox-1,7 protein mRNA, 3′ end. | 8e-059 | |
| 2307 | M18981 | Human prolactin receptor-associated protein | 3e-059 | |
| 2308 | NM_001866.1 | Homo sapiens cytochrome c oxidase subunit VIIb (COX7B), | 2e-059 | |
| | | nuclear gene encoding mitochondrial protein, mRNA > :: | | |
| | | emb\|Z14244\|HSCOX7BM H. sapiens coxVIIb mRNA for | | |
| | | cytochrome c oxidase subunit VIIb | | |
| 2309 | NM_003295.1 | Homo sapiens tumor protein, translationally-controlled 1 | 2e-059 | |
| | | (TPT1) mRNA > ::emb\|X16064\|HSTUMP Human mRNA | | |
| | | for translationally controlled tumor protein | | |
| 2310 | D26067 | Human mRNA for KIAA0033 gene, partial cds | 9e-060 | |
| 2311 | NM_003130.1 | Homo sapiens sorcin (SRI) mRNA > :: | 9e-060 | |
| | | gb\|M32886\|HUMSRICPA Human sorcin CP-22 mRNA, | | |
| 2312 | X93334 | H. sapiens mitochondrial DNA, complete genome | 3e-060 | |
| 2313 | U12404 | Human Csa-19 mRNA, complete cds. | 2e-060 | |
| 2314 | AF070661 | Homo sapiens HSPC005 mRNA, complete cds | 1e-060 | |
| 2315 | U77665 | Human RNaseP protein p30 (RPP30) mRNA, complete cds | 1e-060 | |
| 2316 | L03558 | Homo sapiens cystatin B mRNA, complete cds. | 9e-061 | |
| 2317 | D14048 | Rat mRNA for SP120, complete cds | 3e-061 | |
| 2318 | NM_002450.1 | Homo sapiens metallothionein 1L (MT1L) mRNA > | 3e-061 | |
| 2319 | NM_001866.1 | Homo sapiens cytochrome c oxidase subunit VIIb (COX7B) | 4e-062 | |
| | | nuclear gene encoding mitochondrial protein, mRNA > :: | | |
| | | emb\|Z14244\|HSCOX7BM H. sapiens coxVIIb mRNA for | | |
| | | cytochrome c oxidase subunit VIIb | | |
| 2320 | AC001443 | Homo sapiens (subclone 2_f10 from BAC 2913 | 3e-062 | |
| 2321 | NM_002156.1 | Homo sapiens heat shock 6OkD protein 1 chaperonin | 3e-062 | |
| | | (HSP60) mRNA, complete cds. | | |
| 2322 | Z97207 | Mus musculus mRNA for B-IND1 protein | 3e-062 | |
| 2323 | J01415 | Human mitochondrion, complete genome | 1e-062 | |
| 2324 | D83735 | Homo sapiens mRNA for neutral calponin, complete cds | 4e-063 | |
| 2325 | NM_001866.1 | Homo sapiens cytochrome c oxidase subunit VIIb (COX7B), | 4e-063 | |
| | | nuclear gene encoding mitochondrial protein, mRNA > :: | | |
| | | emb\|Z14244\|HSCOX7BM H. sapiens coxVIIb mRNA for | | |
| | | cytochrome c oxidase subunit VIIb | | |
| 2326 | X84694 | H. sapiens mRNA for elongations factor Tu-mitochondrial | 4e-063 | |
| 2327 | NM_001910.1 | Homo sapiens cathepsin E (CTSE) mRNA > :: | 4e-063 | |
| | | gb\|J05036\|HUMCTSE Human cathepsin E mRNA, complete | | |
| 2328 | AF007775 | Rattus norvegicus aquaporin-pancreas and liver | 3e-063 | |
| 2329 | AF007775 | Rattus norvegicus aquaporin-pancreas and liver | 3e-063 | |
| 2330 | AF007862 | Mus musculus mm-Mago mRNA, complete cds | 3e-063 | |
| 2331 | D38112 | Human mitochondrial DNA, complete sequence | 1e-063 | |
| 2332 | NM_003002.1 | Homo sapiens succinate dehydrogenase complex, subunit D, | 1e-063 | |
| | | integral membrane protein (SDHD) mRNA > :: | | |
| | | dbj\|AB006202\|AB006202 Homo sapiens mRNA for | | |
| | | cytochrome b small subunit of complex H, complete cds | | |
| 2333 | D38112 | Human mitochondrial DNA, complete sequence | 1e-063 | |
| 2334 | M12759 | Human Ig J chain gene, exons 3 and 4. | 1e-063 | |
| 2335 | U07802 | Human Tis11d gene, complete cds. | 1e-063 | |
| 2336 | D14659 | Human mRNA for KIAA0103 gene, complete cds | 1e-063 | |
| 2337 | U38253 | Rattus norvegicus initiation factor eIF-B gamma subunit | 6e-064 | |
| | | (eIF-2B gamma) mRNA, complete cds | | |
| 2338 | M22146 | Human scar protein mRNA, complete cds. | 5e-064 | |
| 2339 | L20681 | Rat proto-oncogene (Ets-1) mRNA, complete cds. | 4e-064 | |
| 2340 | M14292 | Human L1Heg repetitive element ftom the intergenic region | 4e-064 | |
| | | of the epsilon and G-gamma globin genes. | | |
| 2341 | NM_003257.1 | Homo sapiens tight junction protein 1 (zona occludens 1) | 4e-064 | |
| | | (TJP1) mRNA > :: gb\|L14837\|HUMZO1A Human tight | | |
| | | junction (zonula occludens) protein ZO-1 mRNA, complete | | |
| 2342 | NM_003002.1 | Homo sapiens succinate dehydrogenase complex, subunit D | 2e-064 | |
| | | integral membrane protein (SDHD) mRNA > :: | | |
| | | dbj\|AB006202\|AB006202 Homo sapiens mRNA for | | |
| | | cytochrome b small subunit of complex II, complete cds | | |
| 2343 | X12883 | Human mRNA for cytokeratin 18 | 2e-064 | |
| 2344 | D42044 | Human for KIAA0090 gene, partial cds | 1e-064 | |
| 2345 | Z97207 | Mus musculus mRNA for B-IND1 protein | 1e-064 | |
| 2346 | X51867 | H. sapiens MRP RNA gene encoding the RNA component of | 7e-065 | |
| | | RNase MRP | | |
| 2347 | X52104 | Human mRNA for p68 protein | 7e-065 | |
| 2348 | X74215 | H. sapiens mRNA for Lon protease-like protein | 6e-065 | |
| 2349 | U20796 | Rattus norvegicus nuclear receptor Rev-ErbA-beta mRNA, | 5e-065 | |
| 2350 | X79201 | H. sapiens mRNA for SYT | 5e-065 | |
| 2351 | U34584 | Human Bcl-2 interacting killer (BIK) mRNA, complete cds | 5e-065 | |
| 2352 | Z75894 | Human DNA sequence from cosmid U61F10, between | 4e-065 | |
| | | markers DXS366 and DXS87 on chromosome X contains | | |
| 2353 | NM_002131.1 | Homo sapiens high-mobility group (nonhistone | 2e-065 | |
| | | chromosomal) protein isoforms I and Y (HMGIY) mRNA > | | |
| | | :: emb\|X14958\|HSHMGY Human hmgI mRNA for high | | |
| 2354 | AF007862 | Mus musculus mm-Mago mRNA, complete cds | 5e-068 | |
| 2355 | U74297 | Oryctolagus cuniculus PiUS mRNA, complete cds | 3e-069 | |
| 2356 | D11336 | Sus scrofa mRNA for soluble angiotesin-binding protein, | 2e-069 | |
| | | complete cds | | |
| 2357 | AF007862 | Mus musculus mm-Mago mRNA, complete cds | 2e-069 | |
| 2358 | U74297 | Oryctolagus cuniculus PiUS mRNA, complete cds | 3e-071 | |
| 2359 | AF061260 | Mus musculus immunosuperfamily protein B12 mRNA, | 5e-073 | |
| 2360 | U92949 | Mus musculus kinesin motor protein KIFC2 mRNA, | 2e-077 | |
| 2361 | AF007775 | Rattus norvegicus aquaporin-pancreas and liver | 6e-079 | |
| 2362 | AF007775 | Rattus norvegicus aquapotin-pancreas and liver | 8e-082 | |
| 2363 | U63840 | Rattus norvegicus nucleoporin p54 mRNA,complete cds | 6e-085 | |
| 2364 | U57344 | Mus musculus homeobox protein Meis3 mRNA,complete cds | 1e-085 | |
| 2365 | Z11886 | M. musculus notch-1 mRNA | 5e-087 | |
| 2366 | AF007862 | Mus musculus mm-Mago mRNA, complete cds | 2e-089 | |
| 2367 | AF007862 | Mus musculus mm-Mago mRNA, complete cds | 1e-092 | |
| 2368 | Y11092 | M. musculus mRNA for map kinase interacting kinase, Mnk2 | 2e-097 | |
| 2369 | L77991 | Gallus gallus cyclin-dependent kinase (cdk6) gene, complete | 6e-098 | |
| 2370 | U42386 | Mus musculus fibroblast growth factor inducible gene 14 | e-163 | |
| | | (FIN14) mRNA, complete cds | | |
| 2371 | U42386 | Mus musculus fibroblast growth factor inducible gene 14 | e-160 | |
| | | (FIN14) mRNA, complete cds | | |
| 2372 | U42386 | Mus musculus fibroblast growth factor inducible gene 14 | e-144 | |
| | | (FIN14) mRNA, complete cds | | |
| 2373 | AJ000696 | Rattus norvegicus mRNA for a novel kinesin-related protein, | e-106 | |
| 2374 | AJ000696 | Rattus norvegicus mRNA for a novel kinesin-related protein, | e-101 | |
| 2375 | AJ000696 | Rattus norvegicus mRNA for a novel kinesin-related protein, | e-101 | |
| 2376 | Z97207 | Mus musculus for B-IND1 protein | e-102 | |
| 2377 | AJ000696 | Rattus norvegicus mRNA for a novel kinesin-related protein, | e-122 | |
| 2378 | AB000172 | Porcine mRNA for endopeptidase 24.16, complete cds | e-118 | |
| 2379 | AB000171 | Porcine mRNA for endopeptidase 24.16, complete cds | e-131 | |
| 2380 | U38253 | Rattus norvegicus initiation factor eIF-2B gamma subunit | e-129 | |
| | | (eIF-2B gamma) mRNA, complete cds | | |
| 2381 | X54352 | M. domesticus MD6 mRNA | e-142 | |
| 2382 | X14678 | Mouse TPA-induced TIS11 mRNA | e-121 | |
| 2383 | X82632 | M. fascicularis mRNA for NAD+-isocitrate dehydrogenase | e-142 | |
| 2384 | U42385 | Mus musculus fibroblast growth factor inducible gene 16 | e-123 | |
| | | (FIN16) mRNA, complete cds | | |
| 2385 | U17901 | Rattus norvegicus phospholipase A-2-activating protein | e-116 | |
| | | (plap) mRNA, complete cds. | | |
| 2386 | U08215 | Mus musculus Hsp70-related NST-1 (hsr.1) mRNA, | e-119 | |
| 2387 | X82632 | M. fascicularis mRNA for NAD+-isocitrate dehydrogenase | e-148 | |
| 2388 | U63840 | Rattus norvegicus nucleoporin p54 mRNA, complete cds | e-131 | |
| 2389 | U42385 | Mus musculus fibroblast growth factor inducible gene 16 | e-145 | |
| | | (FIN16) mRNA, complete cds | | |
| 2390 | U42385 | Mus musculus fibroblast growth factor inducible gene 16 | e-149 | |
| | | (FIN16) mRNA, complete cds | | |
| 2391 | U81045 | Cricetulus griseus aldo-keto reductase mRNA, complete cds | e-114 | |
| 2392 | L77991 | Gallus gallus cyclin-dependent kinase (cdk6)gene, complete | e-103 | |
| 2393 | U81045 | Cricetulus griseus aldo-keto reductase mRNA, complete cds | e-115 | |
| 2394 | D30666 | Rat mRNA for brain acyl-CoA synthetase II, complete cds | e-139 | |
| 2395 | U17901 | Rattus norvegicus phospholipase A-2 activating protein | e-135 | |
| | | (plap) mRNA, complete cds. | | |
| 2396 | D30666 | Rat mRNA for brain acyl-CoA synthetase II, complete cds | e-126 | |

[0298] TABLE 5

| SEQ | CLST | Library Pair A, B | A | B | A/B | B/A |
|---|---|---|---|---|---|---|
| 1 | 734646 | 16, 17 (Colon Tumor Tissue vs. Colon Metastasis) (Colon Tumor Tissue | 14 | 0 | 14.22 | |
| | | vs. Colon Metastasis) | | | | |
| | | 15, 16 (Normal Colon vs. Colon Tumor Tissue) (Normal Colon vs. | 0 | 14 | | 13.25 |
| | | Colon Tumor Tissue) | | | | |
| 2 | 400221 | 15, 16 (Normal Colon vs. Colon Tumor Tissue) | 13 | 2 | 6.87 | |
| 3 | 205329 | 15, 16 (Normal Colon vs. Colon Tumor Tissue) | 178 | 7 | 26.88 | |
| | | 15, 17 (Normal Colon Tissue vs. Colon Metastasis) (Normal Colon | 178 | 1 | 191.06 | |
| | | Tissue vs. Colon Metastasis) | | | | |
| | | 18, 19 (Normal Colon Tissue vs. Colon Tumor) (Normal Colon Tissue | 21 | 0 | 24 | |
| | | vs. Colon Tumor) | | | | |
| | | 18, 20 (Normal Colon Tissue vs. Colon Metastasis) (Normal Colon | 21 | 0 | 17.95 | |
| | | Tissue vs. Colon Metastasis) | | | | |
| 4 | 446680 | 15, 17 (Normal Colon Tissue vs. Colon Metastasis) | 29 | 84 | | 2.7 |
| | | 23, 24 (Normal Lung Tissue vs. Lung Tumor Tissue) (Normal Lung | 40 | 94 | | 2.33 |
| | | Tissue vs. Lung Tumor Tissue) | | | | |
| 5 | 1261 | 15, 17 (Normal Colon Tissue vs. Colon Metastasis) | 0 | 7 | | 6.52 |
| | | 16, 17 (Colon Tumor Tissue vs. Colon Metastasis) | 0 | 7 | | 6.89 |
| 6 | 400258 | 16, 17 (Colon Tumor Tissue vs. Colon Metastasis) | 6 | 0 | 6.09 | |
| 7 | 450559 | 16, 17 (Colon Tumor Tissue vs. Colon Metastasis) | 2 | 11 | | 5.42 |
| 8 | 450959 | 15, 16 (Normal Colon vs. Colon Tumor Tissue) | 1 | 9 | | 8.51 |
| 9 | 451794 | 15, 16 (Normal Colon vs. Colon Tumor Tissue) | 15 | 0 | 15.85 | |
| | | 15, 17 (Normal Colon Tissue vs. Colon Metastasis) | 15 | 1 | 16.1 | |
| 10 | 415058 | 16, 17 (Colon Tumor Tissue vs. Colon Metastasis) | 0 | 6 | | 5.91 |
| 11 | 31506 | 15, 16 (Normal Colon vs. Colon Tumor Tissue) | 20 | 77 | | 3.64 |
| | | Low Met) | 5 | 0 | 6.99 | |
| | | 15, 17 (Normal Colon Tissue vs. Colon Metastasis) | 20 | 58 | | 2.7 |
| 12 | 417155 | 15, 16 (Normal Colon vs. Colon Tumor Tissue) | 6 | 0 | 6.34 | |
| 13 | 448925 | 16, 17 (Colon Tumor Tissue vs. Colon Metastasis) | 5 | 15 | | 2.95 |
| 14 | 11329 | 19, 20 (Colon Tumor Tissue vs. Colon Metastasis) (Colon Tumor Tissue | 30 | 5 | 4.49 | |
| | | vs. Colon Metastasis) | | | | |
| | | 15, 16 (Normal Colon vs. Colon Tumor Tissue) | 112 | 38 | 3.12 | |
| 15 | 650422 | 15, 17 (Normal Colon Tissue vs. Colon Metastasis) | 18 | 0 | 19.32 | |
| | | 16, 17 (Colon Tumor Tissue vs. Colon Metastasis) | 6 | 0 | 6.09 | |
| | | 15, 16 (Normal Colon vs. Colon Tumor Tissue) | 18 | 6 | 3.17 | |
| 16 | 6863 | 01, 02 (Colon, High Met vs. Colon, Low Met) | 1 | 8 | | 8.67 |
| 17 | 449690 | 16, 17 (Colon Tumor Tissue vs. Colon Metastasis) | 3 | 17 | | 5.58 |
| 18 | 724616 | 15, 16 (Normal Colon vs. Colon Tumor Tissue) | 0 | 8 | | 7.57 |
| | | 16, 17 (Colon Tumor Tissue vs. Colon Metastasis) | 8 | 0 | 8.12 | |
| 19 | 549722 | 16, 17 (Colon Tumor Tissue vs. Colon Metastasis) | 0 | 6 | | 5.91 |
| 20 | 549722 | 16, 17 (Colon Tumor Tissue vs. Colon Metastasis) | 0 | 6 | | 5.91 |
| 21 | 448110 | 15, 17 (Normal Colon Tissue vs. Colon Metastasis) | 2 | 25 | | 11.65 |
| | | 16, 17 (Colon Tumor Tissue vs. Colon Metastasis) | 1 | 25 | | 24.62 |
| 22 | 515631 | 15, 16 (Normal Colon vs. Colon Tumor Tissue) | 0 | 6 | | 5.68 |
| 23 | 11881 | 03, 04 (Breast, High Met vs. Breast, Non-Met) | 6 | 0 | 5.85 | |
| 24 | 650856 | 16, 17 (Colon Tumor Tissue vs. Colon Metastasis) | 6 | 0 | 6.09 | |
| 25 | 449701 | 16, 17 (Colon Tumor Tissue vs. Colon Metastasis) | 17 | 1 | 17.26 | |
| | | 15, 16 (Normal Colon vs. Colon Tumor Tissue) | 1 | 17 | | 16.08 |
| 26 | 651073 | 15, 16 (Normal Colon vs. Colon Tumor Tissue) | 7 | 0 | 7.4 | |
| | | 15, 17 (Normal Colon Tissue vs. Colon Metastasis) | 7 | 0 | 7.51 | |
| 27 | 10340 | 03, 04 (Breast, High Met vs. Breast, Non-Met) | 6 | 0 | 5.85 | |
| 28 | 648310 | 15, 16 (Normal Colon vs. Colon Tumor Tissue) | 6 | 0 | 6.34 | |
| | | 15, 17 (Normal Colon Tissue vs. Colon Metastasis) | 6 | 0 | 6.44 | |
| 29 | 730336 | 15, 16 (Normal Colon vs. Colon Tumor Tissue) | 0 | 24 | | 22.71 |
| | | 16, 17 (Colon Tumor Tissue vs. Colon Metastasis) | 24 | 0 | 24.37 | |
| 30 | 3060 | 16, 17 (Colon Tumor Tissue vs. Colon Metastasis) | 4 | 17 | | 4.19 |
| | | 15, 16 (Normal Colon vs. Colon Tumor Tissue) | 14 | 4 | 3.7 | |
| | | 03, 04 (Breast, High Met vs. Breast, Non-Met) | 0 | 11 | | 11.27 |
| 31 | 453016 | 15, 16 (Normal Colon vs. Colon Tumor Tissue) | 0 | 6 | | 5.68 |
| | | 16, 17 (Colon Tumor Tissue vs. Colon Metastasis) | 6 | 0 | 6.09 | |
| 33 | 185461 | 03, 04 (Breast, High Met vs. Breast, Non-Met) | 0 | 17 | | 17.42 |
| 34 | 452530 | 15, 16 (Normal Colon vs. Colon Tumor Tissue) | 10 | 2 | 5.28 | |
| 35 | 448925 | 16, 17 (Colon Tumor Tissue vs. Colon Metastasis) | 5 | 15 | | 2.95 |
| 36 | 1013 | 15, 17 (Normal Colon Tissue vs. Colon Metastasis) | 6 | 0 | 6.44 | |
| | | 15, 16 (Normal Colon vs. Colon Tumor Tissue) | 6 | 0 | 6.34 | |
| | | 01, 02 (Colon, High Met vs. Colon, Low Met) | 40 | 84 | | 2.28 |
| 37 | 6545 | 03, 04 (Breast, High Met vs. Breast, Non-Met) | 0 | 9 | | 9.22 |
| 38 | 449891 | 15, 16 (Normal Colon vs. Colon Tumor Tissue) | 8 | 1 | 8.46 | |
| 39 | 4045 | 01, 02 (Colon, High Met vs. Colon, Low Met) | 2 | 11 | | 5.96 |
| | | 03, 04 (Breast, High Met vs. Breast, Non-Met) | 10 | 1 | 9.76 | |
| 40 | 404475 | 16, 17 (Colon Tumor Tissue vs. Colon Metastasis) | 11 | 2 | 5.59 | |
| | | 15, 17 (Normal Colon Tissue vs. Colon Metastasis) | 19 | 2 | 10.2 | |
| 41 | 650297 | 15, 17 (Normal Colon Tissue vs. Colon Metastasis) | 6 | 0 | 6.44 | |
| 42 | 650493 | 15, 17 (Normal Colon Tissue vs. Colon Metastasis) | 7 | 0 | 7.51 | |
| 43 | 644884 | 15, 17 (Normal Colon Tissue vs. Colon Metastasis) | 11 | 0 | 11.81 | |
| | | 16, 17 (Colon Tumor Tissue vs. Colon Metastasis) | 6 | 0 | 6.09 | |
| 44 | 452212 | 15, 16 (Normal Colon vs. Colon Tumor Tissue) | 6 | 0 | 6.34 | |
| 45 | 402727 | 15, 17 (Normal Colon Tissue vs. Colon Metastasis) | 5 | 17 | | 3.17 |
| 46 | 645194 | 15, 17 (Normal Colon Tissue vs. Colon Metastasis) | 7 | 0 | 7.51 | |
| 47 | 447501 | 15, 17 (Normal Colon Tissue vs. Colon Metastasis) | 15 | 3 | 5.37 | |
| 48 | 556326 | 16, 17 (Colon Tumor Tissue vs. Colon Metastasis) | 0 | 8 | | 7.88 |
| 49 | 447035 | 16, 17 (Colon Tumor Tissue vs. Colon Metastasis) | 8 | 1 | 8.12 | |
| 50 | 2551 | 16, 17 (Colon Tumor Tissue vs. Colon Metastasis) | 6 | 0 | 6.09 | |
| 51 | 736154 | 15, 16 (Normal Colon vs. Colon Tumor Tissue) | 0 | 7 | | 6.62 |
| | | 16, 17 (Colon Tumor Tissue vs. Colon Metastasis) | 7 | 0 | 7.11 | |
| 52 | 452028 | 15, 17 (Normal Colon Tissue vs. Colon Metastasis) | 0 | 7 | | 6.52 |
| 53 | 447441 | 15, 17 (Normal Colon Tissue vs. Colon Metastasis) | 34 | 129 | | 3.53 |
| | | 16, 17 (Colon Tumor Tissue vs. Colon Metastasis) | 34 | 129 | | 3.74 |
| | | 19, 20 (Colon Tumor Tissue vs. Colon Metastasis) | 1 | 8 | | 10.7 |
| | | 23, 24 (Normal Lung Tissue vs. Lung Tumor Tissue) | 155 | 32 | 4.89 | |
| 54 | 11028 | 01, 02 (Colon, High Met vs. Colon, Low Met) (Colon, High Met vs. | 0 | 6 | | 6.5 |
| | | Colon, Low Met) | | | | |
| 55 | 640974 | 15, 17 (Normal Colon Tissue vs. Colon Metastasis) | 9 | 0 | 9.66 | |
| 56 | 555103 | 15, 17 (Normal Colon Tissue vs. Colon Metastasis) | 0 | 7 | | 6.52 |
| | | 23, 24 (Normal Lung Tissue vs. Lung Tumor Tissue) | 0 | 6 | | 5.94 |
| 57 | 446789 | 15, 16 (Normal Colon vs. Colon Tumor Tissue) | 16 | 5 | 3.38 | |
| 58 | 644884 | 15, 17 (Normal Colon Tissue vs. Colon Metastasis) | 11 | 0 | 11.81 | |
| | | 16, 17 (Colon Tumor Tissue vs. Colon Metastasis) | 6 | 0 | 6.09 | |
| 59 | 9029 | 01, 02 (Colon, High Met vs. Colon, Low Met) | 7 | 0 | 6.46 | |
| 60 | 419255 | 15, 16 (Normal Colon vs. Colon Tumor Tissue) | 11 | 0 | 11.63 | |
| | | 15, 17 (Normal Colon Tissue vs. Colon Metastasis) | 11 | 1 | 11.81 | |
| 61 | 4309 | 01, 02 (Colon, High Met vs. Colon, Low Met) | 4 | 13 | | 3.52 |
| 62 | 554069 | 16, 17 (Colon Tumor Tissue vs. Colon Metastasis) | 0 | 6 | | 5.91 |
| 63 | 4330 | 03, 04 (Breast, High Met vs. Breast, Non-Met) (Breast, High Met vs. | 13 | 3 | 4.23 | |
| | | Breast, Non-Met) | | | | |
| | | 01, 02 (Colon, High Met vs. Colon, Low Met) | 1 | 10 | | 10.84 |
| 64 | 644903 | 15, 17 (Normal Colon Tissue vs. Colon Metastasis) | 7 | 0 | 7.51 | |
| 65 | 549395 | 15, 17 (Normal Colon Tissue vs. Colon Metastasis) | 2 | 13 | | 6.06 |
| | | 16, 17 (Colon Tumor Tissue vs. Colon Metastasis) | 1 | 13 | | 12.8 |
| 66 | 4974 | 01, 02 (Colon, High Met vs. Colon, Low Met) | 1 | 8 | | 8.67 |
| 67 | 447466 | 15, 16 (Normal Colon vs. Colon Tumor Tissue) | 155 | 5 | 32.77 | |
| | | 18, 19 (Normal Colon Tissue vs. Colon Tumor) | 16 | 1 | 18.28 | |
| | | 15, 17 (Normal Colon Tissue vs. Colon Metastasis) | 155 | 2 | 83.19 | |
| | | 18, 20 (Normal Colon Tissue vs. Colon Metastasis) | 16 | 0 | 13.68 | |
| 68 | 645073 | 15, 16 (Normal Colon vs. Colon Tumor Tissue) | 6 | 0 | 6.34 | |
| | | 15, 17 (Normal Colon Tissue vs. Colon Metastasis) | 6 | 0 | 6.44 | |
| 69 | 447978 | 15, 17 (Normal Colon Tissue vs. Colon Metastasis) | 0 | 8 | | 7.45 |
| 70 | 607430 | 15, 16 (Normal Colon vs. Colon Tumor Tissue) | 6 | 0 | 6.34 | |
| 71 | 556198 | 15, 16 (Normal Colon vs. Colon Tumor Tissue) | 0 | 6 | | 5.68 |
| 72 | 450323 | 15, 17 (Normal Colon Tissue vs. Colon Metastasis) | 0 | 8 | | 7.45 |
| 73 | 21205 | 03, 04 (Breast, High Met vs. Breast, Non-Met) | 1 | 9 | | 9.22 |
| 74 | 561109 | 15, 16 (Normal Colon vs. Colon Tumor Tissue) | 0 | 8 | | 7.57 |
| 75 | 446673 | 16, 17 (Colon Tumor Tissue vs. Colon Metastasis) | 8 | 1 | 8.12 | |
| 76 | 456026 | 15, 16 (Normal Colon vs. Colon Tumor Tissue) | 24 | 4 | 6.34 | |
| | | 15, 17 (Normal Colon Tissue vs. Colon Metastasis) | 24 | 8 | 3.22 | |
| 77 | 449142 | 16, 17 (Colon Tumor Tissue vs. Colon Metastasis) | 9 | 1 | 9.14 | |
| 78 | 5830 | 16, 17 (Colon Tumor Tissue vs. Colon Metastasis) | 7 | 0 | 7.11 | |
| | | 15, 16 (Normal Colon vs. Colon Tumor Tissue) | 0 | 7 | | 6.62 |
| 79 | 554109 | 15, 16 (Normal Colon vs. Colon Tumor Tissue) | 15 | 2 | 7.93 | |
| | | 16, 17 (Colon Tumor Tissue vs. Colon Metastasis) | 2 | 11 | | 5.42 |
| 80 | 595506 | 15, 16 (Normal Colon vs. Colon Tumor Tissue) | 0 | 6 | | 5.68 |
| 81 | 453981 | 23, 24 (Normal Lung Tissue vs. Lung Tumor Tissue) | 43 | 258 | | 5.94 |
| | | 19, 20 (Colon Tumor Tissue vs. Colon Metastasis) | 2 | 110 | | 73.53 |
| | | 16, 17 (Colon Tumor Tissue vs. Colon Metastasis) | 590 | 6 | 99.86 | |
| | | 15, 17 (Normal Colon Tissue vs. Colon Metastasis) | 68 | 6 | 12.16 | |
| | | 15, 16 (Normal Colon vs. Colon Tumor Tissue) | 68 | 590 | | 8.21 |
| | | 18, 20 (Normal Colon Tissue vs. Colon Metastasis) | 0 | 110 | | 128.69 |
| 82 | 642461 | 15, 17 (Normal Colon Tissue vs. Colon Metastasis) | 14 | 0 | 15.03 | |
| | | 16, 17 (Colon Tumor Tissue vs. Colon Metastasis) | 10 | 0 | 10.16 | |
| 83 | 556198 | 15, 16 (Normal Colon vs. Colon Tumor Tissue) | 0 | 6 | | 5.68 |
| 84 | 2082 | 15, 16 (Normal Colon vs. Colon Tumor Tissue) | 0 | 7 | | 6.62 |
| | | 03, 04 (Breast, High Met vs. Breast, Non-Met) | 15 | 55 | | 3.76 |
| | | 08, 09 (Lung, High Met vs. Lung, Low Met) | 7 | 38 | | 3.88 |
| 85 | 549435 | 15, 16 (Normal Colon vs. Colon Tumor Tissue) | 14 | 2 | 7.4 | |
| 86 | 2286 | 15, 16 (Normal Colon vs. Colon Tumor Tissue) | 5 | 28 | | 5.3 |
| | | 19, 20 (Colon Tumor Tissue vs. Colon Metastasis) | 13 | 2 | 4.86 | |
| | | 15, 17 (Normal Colon Tissue vs. Colon Metastasis) | 5 | 19 | | 3.54 |
| | | 18, 19 (Normal Colon Tissue vs. Colon Tumor) | 3 | 13 | | 3.79 |
| 87 | 2737 | 16, 17 (Colon Tumor Tissue vs. Colon Metastasis) | 3 | 14 | | 4.6 |
| | | 15, 17 (Normal Colon Tissue vs. Colon Metastasis) | 4 | 14 | | 3.26 |
| 88 | 728115 | 15, 16 (Normal Colon vs. Colon Tumor Tissue) | 0 | 7 | | 6.62 |
| | | 16, 17 (Colon Tumor Tissue vs. Colon Metastasis) | 7 | 0 | 7.11 | |
| 89 | 650856 | 16, 17 (Colon Tumor Tissue vs. Colon Metastasis) | 6 | 0 | 6.09 | |
| 90 | 650476 | 15, 17 (Normal Colon Tissue vs. Colon Metastasis) | 7 | 0 | 7.51 | |
| 91 | 535208 | 15, 17 (Normal Colon Tissue vs. Colon Metastasis) | 6 | 0 | 6.44 | |
| | | 15, 16 (Normal Colon vs. Colon Tumor Tissue) | 6 | 0 | 6.34 | |
| 92 | 733849 | 15, 16 (Normal Colon vs. Colon Tumor Tissue) | 0 | 7 | | 6.62 |
| | | 16, 17 (Colon Tumor Tissue vs. Colon Metastasis) | 7 | 0 | 7.11 | |
| 93 | 447978 | 15, 17 (Normal Colon Tissue vs. Colon Metastasis) | 0 | 8 | | 7.45 |
| 94 | 729483 | 15, 16 (Normal Colon vs. Colon Tumor Tissue) | 0 | 6 | | 5.68 |
| | | 16, 17 (Colon Tumor Tissue vs. Colon Metastasis) | 6 | 0 | 6.09 | |
| 95 | 12018 | 03, 04 (Breast, High Met vs. Breast, Non-Met) | 0 | 6 | | 6.15 |
| 96 | 4747 | 01, 02 (Colon, High Met vs. Colon, Low Met) | 2 | 10 | | 5.42 |
| 97 | 4747 | 01, 02 (Colon, High Met vs. Colon, Low Met) | 2 | 10 | | 5.42 |
| 98 | 185577 | 03, 04 (Breast, High Met vs. Breast, Non-Met) | 0 | 8 | | 8.2 |
| 99 | 4126 | 03, 04 (Breast, High Met vs. Breast, Non-Met) | 13 | 1 | 12.68 | |
| 100 | 11456 | 01, 02 (Colon, High Met vs. Colon, Low Met) | 0 | 6 | | 6.5 |
| 101 | 729851 | 16, 17 (Colon Tumor Tissue vs. Colon Metastasis) | 7 | 0 | 7.11 | |
| | | 15, 16 (Normal Colon vs. Colon Tumor Tissue) | 0 | 7 | | 6.62 |
| 102 | 449849 | 16, 17 (Colon Tumor Tissue vs. Colon Metastasis) | 0 | 6 | | 5.91 |
| 103 | 2490 | 08, 09 (Lung, High Met vs. Lung, Low Met) | 7 | 1 | 9.78 | |
| | | 01, 02 (Colon, High Met vs. Colon, Low Met) | 21 | 6 | 3.23 | |
| | | 03, 04 (Breast, High Met vs. Breast, Non-Met) | 14 | 3 | 4.55 | |
| 104 | 549041 | 16, 17 (Colon Tumor Tissue vs. Colon Metastasis) | 0 | 6 | | 5.91 |
| 105 | 11881 | 03, 04 (Breast, High Met vs. Breast, Non-Met) | 6 | 0 | 5.85 | |
| 106 | 724296 | 15, 16 (Normal Colon vs. Colon Tumor Tissue) | 0 | 128 | | 121.1 |
| | | 16, 17 (Colon Tumor Tissue vs. Colon Metastasis) | 128 | 0 | 129.99 | |
| 107 | 726173 | 15, 16 (Normal Colon vs. Colon Tumor Tissue) | 0 | 6 | | 5.68 |
| | | 16, 17 (Colon Tumor Tissue vs. Colon Metastasis) | 6 | 0 | 6.09 | |
| 108 | 2423 | 03, 04 (Breast, High Met vs. Breast, Non-Met) | 14 | 0 | 13.66 | |
| 109 | 556250 | 15, 16 (Normal Colon vs. Colon Tumor Tissue) | 1 | 28 | | 26.49 |
| | | 16, 17 (Colon Tumor Tissue vs. Colon Metastasis) | 28 | 4 | 7.11 | |
| 110 | 643594 | 15, 17 (Normal Colon Tissue vs. Colon Metastasis) | 7 | 0 | 7.51 | |
| | | 15, 16 (Normal Colon vs. Colon Tumor Tissue) | 7 | 0 | 7.4 | |
| 111 | 11881 | 03, 04 (Breast, High Met vs. Breast, Non-Met) | 6 | 0 | 5.85 | |
| 112 | 7436 | 03, 04 (Breast, High Met vs. Breast, Non-Met) | 9 | 1 | 8.78 | |
| 113 | 2110 | 03, 04 (Breast, High Met vs. Breast, Non-Met) | 31 | 5 | 6.05 | |
| 114 | 10340 | 03, 04 (Breast, High Met vs. Breast, Non-Met) | 6 | 0 | 5.85 | |
| 115 | 643594 | 15, 16 (Normal Colon vs. Colon Tumor Tissue) | 7 | 0 | 7.4 | |
| | | 15, 17 (Normal Colon Tissue vs. Colon Metastasis) | 7 | 0 | 7.51 | |
| 116 | 447035 | 16, 17 (Colon Tumor Tissue vs. Colon Metastasis) | 8 | 1 | 8.12 | |
| 117 | 402707 | 15, 17 (Normal Colon Tissue vs. Colon Metastasis) | 1 | 9 | | 8.38 |
| 118 | 645799 | 16, 17 (Colon Tumor Tissue vs. Colon Metastasis) | 7 | 0 | 7.11 | |
| 119 | 171511 | 16, 17 (Colon Tumor Tissue vs. Colon Metastasis) | 7 | 0 | 7.11 | |
| | | 15, 16 (Normal Colon vs. Colon Tumor Tissue) | 0 | 7 | | 6.62 |
| 120 | 451607 | 16, 17 (Colon Tumor Tissue vs. Colon Metastasis) | 1 | 9 | | 8.86 |
| 121 | 3138 | 03, 04 (Breast, High Met vs. Breast, Non-Met) | 1 | 10 | | 10.25 |
| 122 | 2988 | 01, 02 (Colon, High Met vs. Colon, Low Met) | 2 | 11 | | 5.96 |
| 123 | 447326 | 15, 17 (Normal Colon Tissue vs. Colon Metastasis) | 6 | 0 | 6.44 | |
| 124 | 561734 | 15, 16 (Normal Colon vs. Colon Tumor Tissue) | 0 | 6 | | 5.68 |
| 125 | 454999 | 15, 17 (Normal Colon Tissue vs. Colon Metastasis) | 28 | 15 | 2 | |
| | | 15, 16 (Normal Colon vs. Colon Tumor Tissue) | 28 | 11 | 2.69 | |
| 126 | 185652 | 03, 04 (Breast, High Met vs. Breast, Non-Met) | 0 | 7 | | 7.17 |
| 127 | 6725 | 03, 04 (Breast, High Met vs. Breast, Non-Met) | 10 | 0 | 9.76 | |
| 128 | 726644 | 15, 16 (Normal Colon vs. Colon Tumor Tissue) | 0 | 18 | | 17.03 |
| | | 16, 17 (Colon Tumor Tissue vs. Colon Metastasis) | 18 | 0 | 18.28 | |
| 129 | 11012 | 01, 02 (Colon, High Met vs. Colon, Low Met) | 0 | 6 | | 6.5 |
| 130 | 726377 | 16, 17 (Colon Tumor Tissue vs. Colon Metastasis) | 7 | 0 | 7.11 | |
| | | 15, 16 (Normal Colon vs. Colon Tumor Tissue) | 0 | 7 | | 6.62 |
| 131 | 735326 | 15, 16 (Normal Colon vs. Colon Tumor Tissue) | 0 | 7 | | 6.62 |
| | | 16, 17 (Colon Tumor Tissue vs. Colon Metastasis) | 7 | 0 | 7.11 | |
| 132 | 650845 | 16, 17 (Colon Tumor Tissue vs. Colon Metastasis) | 6 | 0 | 6.09 | |
| 133 | 9048 | 01, 02 (Colon, High Met vs. Colon, Low Met) | 7 | 0 | 6.46 | |
| 134 | 732254 | 15, 16 (Normal Colon vs. Colon Tumor Tissue) | 0 | 6 | | 5.68 |
| | | 23, 24 (Normal Lung Tissue vs. Lung Tumor Tissue) | 0 | 8 | | 7.92 |
| | | 16, 17 (Colon Tumor Tissue vs. Colon Metastasis) | 6 | 0 | 6.09 | |
| 135 | 452052 | 15, 17 (Normal Colon Tissue vs. Colon Metastasis) | 8 | 1 | 8.59 | |
| 136 | 554079 | 16, 17 (Colon Tumor Tissue vs. Colon Metastasis) | 2 | 10 | | 4.92 |
| 137 | 9049 | 01, 02 (Colon, High Met vs. Colon, Low Met) | 7 | 0 | 6.46 | |
| 138 | 1307 | 03, 04 (Breast, High Met vs. Breast, Non-Met) | 14 | 89 | | 6.52 |
| 139 | 139730 | 03, 04 (Breast, High Met vs. Breast, Non-Met) | 0 | 9 | | 9.22 |
| 140 | 7750 | 03, 04 (Breast, High Met vs. Breast, Non-Met) | 1 | 14 | | 14.35 |
| 141 | 8050 | 01, 02 (Colon, High Met vs. Colon, Low Met) | 0 | 7 | | 7.59 |
| 142 | 725222 | 15, 16 (Normal Colon vs. Colon Tumor Tissue) | 0 | 7 | | 6.62 |
| | | 16, 17 (Colon Tumor Tissue vs. Colon Metastasis) | 7 | 0 | 7.11 | |
| 143 | 3275 | 03, 04 (Breast, High Met vs. Breast, Non-Met) | 8 | 0 | 7.81 | |
| 144 | 7424 | 03, 04 (Breast, High Met vs. Breast, Non-Met) | 6 | 0 | 5.85 | |
| 145 | 8953 | 03, 04 (Breast, High Met vs. Breast, Non-Met) | 0 | 13 | | 13.32 |
| 146 | 8966 | 03, 04 (Breast, High Met vs. Breast, Non-Met) | 0 | 7 | | 7.17 |
| 147 | 530883 | 15, 16 (Normal Colon vs. Colon Tumor Tissue) | 0 | 7 | | 6.62 |
| 148 | 6725 | 03, 04 (Breast, High Met vs. Breast, Non-Met) | 10 | 0 | 9.76 | |
| 149 | 4439 | 08, 09 (Lung, High Met vs. Lung, Low Met) | 10 | 2 | 6.99 | |
| | | 01, 02 (Colon, High Met vs. Colon, Low Met) | 15 | 2 | 6.92 | |
| 150 | 648472 | 15, 17 (Normal Colon Tissue vs. Colon Metastasis) | 7 | 0 | 7.51 | |
| 151 | 735346 | 15, 16 (Normal Colon vs. Colon Tumor Tissue) | 0 | 6 | | 5.68 |
| | | 16, 17 (Colon Tumor Tissue vs. Colon Metastasis) | 6 | 0 | 6.09 | |
| 152 | 732121 | 15, 16 (Normal Colon vs. Colon Tumor Tissue) | 0 | 7 | | 6.62 |
| | | 16, 17 (Colon Tumor Tissue vs. Colon Metastasis) | 7 | 0 | 7.11 | |
| 153 | 650337 | 15, 17 (Normal Colon Tissue vs. Colon Metastasis) | 6 | 0 | 6.44 | |
| | | 15, 16 (Normal Colon vs. Colon Tumor Tissue) | 6 | 0 | 6.34 | |
| 154 | 533588 | 15, 17 (Normal Colon Tissue vs. Colon Metastasis) | 7 | 0 | 7.51 | |
| 155 | 649667 | 15, 16 (Normal Colon vs. Colon Tumor Tissue) | 6 | 0 | 6.34 | |
| | | 15, 17 (Normal Colon Tissue vs. Colon Metastasis) | 6 | 0 | 6.44 | |
| 156 | 394436 | 15, 17 (Normal Colon Tissue vs. Colon Metastasis) | 7 | 0 | 7.51 | |
| 157 | 649354 | 15, 17 (Normal Colon Tissue vs. Colon Metastasis) | 6 | 0 | 6.44 | |
| | | 15, 16 (Normal Colon vs. Colon Tumor Tissue) | 6 | 0 | 6.34 | |
| 158 | 2022 | 03, 04 (Breast, High Met vs. Breast, Non-Met) | 5 | 15 | | 3.07 |
| | | 21, 22 (Normal Prostate vs. Prostate Cancer) | 0 | 6 | | 6.1 |
| 159 | 561359 | 15, 17 (Normal Colon Tissue vs. Colon Metastasis) | 12 | 3 | 4.29 | |
| | | 15, 16 (Normal Colon vs. Colon Tumor Tissue) | 12 | 2 | 6.34 | |
| 160 | 7607 | 15, 17 (Normal Colon Tissue vs. Colon Metastasis) | 13 | 3 | 4.65 | |
| | | 01, 02 (Colon, High Met vs. Colon, Low Met) | 0 | 7 | | 7.59 |
| | | 15, 16 (Normal Colon vs. Colon Tumor Tissue) | 13 | 4 | 3.44 | |
| 161 | 7750 | 03, 04 (Breast, High Met vs. Breast, Non-Met) | 1 | 14 | | 14.35 |
| 162 | 410554 | 16, 17 (Colon Tumor Tissue vs. Colon Metastasis) | 6 | 0 | 6.09 | |
| | | 15, 16 (Normal Colon vs. Colon Tumor Tissue) | 0 | 6 | | 5.68 |
| 163 | 2315 | 03, 04 (Breast, High Met vs. Breast, Non-Met) | 7 | 118 | | 17.28 |
| | | 01, 02 (Colon, High Met vs. Colon, Low Met) | 25 | 4 | 5.76 | |
| 164 | 561734 | 15, 16 (Normal Colon vs. Colon Tumor Tissue) | 0 | 6 | | 5.68 |
| 165 | 4420 | 03, 04 (Breast, High Met vs. Breast, Non-Met) | 6 | 0 | 5.85 | |
| | | 01, 02 (Colon, High Met vs. Colon, Low Met) | 1 | 10 | | 10.84 |
| 166 | 559663 | 15, 16 (Normal Colon vs. Colon Tumor Tissue) | 15 | 4 | 3.96 | |
| 167 | 7082 | 03, 04 (Breast, High Met vs. Breast, Non-Met) | 10 | 0 | 9.76 | |
| 168 | 2315 | 03, 04 (Breast, High Met vs. Breast, Non-Met) | 7 | 118 | | 17.28 |
| | | 01, 02 (Colon, High Met vs. Colon, Low Met) | 25 | 4 | 5.76 | |
| 169 | 650472 | 15, 17 (Normal Colon Tissue vs. Colon Metastasis) | 6 | 0 | 6.44 | |
| 170 | 6482 | 01, 02 (Colon, High Met vs. Colon, Low Met) | 0 | 6 | | 6.5 |
| 171 | 4584 | 01, 02 (Colon, High Met vs. Colon, Low Met) | 1 | 11 | | 11.93 |
| 172 | 453846 | 15, 17 (Normal Colon Tissue vs. Colon Metastasis) | 0 | 11 | | 10.25 |
| 173 | 650820 | 16, 17 (Colon Tumor Tissue vs. Colon Metastasis) | 8 | 0 | 8.12 | |
| 174 | 642906 | 16, 17 (Colon Tumor Tissue vs. Colon Metastasis) | 7 | 0 | 7.11 | |
| 175 | 448805 | 16, 17 (Colon Tumor Tissue vs. Colon Metastasis) | 6 | 20 | | 3.28 |
| 176 | 649667 | 15, 16 (Normal Colon vs. Colon Tumor Tissue) | 6 | 0 | 6.34 | |
| | | 15, 17 (Normal Colon Tissue vs. Colon Metastasis) | 6 | 0 | 6.44 | |
| 177 | 735786 | 16, 17 (Colon Tumor Tissue vs. Colon Metastasis) | 7 | 0 | 7.11 | |
| | | 15, 16 (Normal Colon vs. Colon Tumor Tissue) | 0 | 7 | | 6.62 |
| 178 | 121457 | 08, 09 (Lung, High Met vs. Lung, Low Met) | 91 | 359 | | 2.82 |
| | | 15, 17 (Normal Colon Tissue vs. Colon Metastasis) | 2 | 11 | | 5.12 |
| 179 | 372960 | 15, 17 (Normal Colon Tissue vs. Colon Metastasis) | 6 | 18 | | 2.79 |
| | | 15, 16 (Normal Colon vs. Colon Tumor Tissue) | 6 | 33 | | 5.2 |
| 180 | 120049 | 15, 17 (Normal Colon Tissue vs. Colon Metastasis) | 10 | 2 | 5.37 | |
| 181 | 648996 | 15, 17 (Normal Colon Tissue vs. Colon Metastasis) | 6 | 0 | 6.44 | |
| | | 15, 16 (Normal Colon vs. Colon Tumor Tissue) | 6 | 0 | 6.34 | |
| 182 | 3765 | 01, 02 (Colon, High Met vs. Colon, Low Met) | 19 | 6 | 2.92 | |
| 183 | 462642 | 15, 16 (Normal Colon vs. Colon Tumor Tissue) | 6 | 0 | 6.34 | |
| | | 15, 17 (Normal Colon Tissue vs. Colon Metastasis) | 6 | 0 | 6.44 | |
| 184 | 727181 | 15, 16 (Normal Colon vs. Colon Tumor Tissue) | 0 | 6 | | 5.68 |
| | | 16, 17 (Colon Tumor Tissue vs. Colon Metastasis) | 6 | 0 | 6.09 | |
| 185 | 649259 | 15, 16 (Normal Colon vs. Colon Tumor Tissue) | 7 | 0 | 7.4 | |
| | | 15, 17 (Normal Colon Tissue vs. Colon Metastasis) | 7 | 0 | 7.51 | |
| 186 | 649717 | 16, 17 (Colon Tumor Tissue vs. Colon Metastasis) | 6 | 0 | 6.09 | |
| 187 | 736860 | 16, 17 (Colon Tumor Tissue vs. Colon Metastasis) | 6 | 0 | 6.09 | |
| | | 15, 16 (Normal Colon vs. Colon Tumor Tissue) | 0 | 6 | | 5.68 |
| 188 | 729175 | 16, 17 (Colon Tumor Tissue vs. Colon Metastasis) | 6 | 0 | 6.09 | |
| | | 15, 16 (Normal Colon vs. Colon Tumor Tissue) | 0 | 6 | | 5.68 |
| 189 | 642906 | 16, 17 (Colon Tumor Tissue vs. Colon Metastasis) | 7 | 0 | 7.11 | |
| 190 | 4420 | 03, 04 (Breast, High Met vs. Breast, Non-Met) | 6 | 0 | 5.85 | |
| | | 01, 02 (Colon, High Met vs. Colon, Low Met) | 1 | 10 | | 10.84 |
| 191 | 2420 | 01, 02 (Colon, High Met vs. Colon, Low Met) | 28 | 11 | 2.35 | |
| 192 | 648109 | 15, 17 (Normal Colon Tissue vs. Colon Metastasis) | 8 | 0 | 8.59 | |
| | | 15, 16 (Normal Colon vs. Colon Tumor Tissue) | 8 | 1 | 8.46 | |
| 193 | 2334 | 15, 16 (Normal Colon vs. Colon Tumor Tissue) | 0 | 6 | | 5.68 |
| 194 | 639705 | 15, 16 (Normal Colon vs. Colon Tumor Tissue) | 10 | 0 | 10.57 | |
| | | 15, 17 (Normal Colon Tissue vs. Colon Metastasis) | 10 | 0 | 10.73 | |
| 195 | 551907 | 15, 16 (Normal Colon vs. Colon Tumor Tissue) | 7 | 0 | 7.4 | |
| 196 | 561382 | 15, 16 (Normal Colon vs. Colon Tumor Tissue) | 12 | 2 | 6.34 | |
| 197 | 595506 | 15, 16 (Normal Colon vs. Colon Tumor Tissue) | 0 | 6 | | 5.68 |
| 198 | 499424 | 15, 16 (Normal Colon vs. Colon Tumor Tissue) | 0 | 8 | | 7.57 |
| 199 | 735477 | 16, 17 (Colon Tumor Tissue vs. Colon Metastasis) | 7 | 0 | 7.11 | |
| | | 15, 16 (Normal Colon vs. Colon Tumor Tissue) | 0 | 7 | | 6.62 |
| 200 | 734370 | 15, 16 (Normal Colon vs. Colon Tumor Tissue) | 0 | 11 | | 10.41 |
| | | 16, 17 (Colon Tumor Tissue vs. Colon Metastasis) | 11 | 0 | 11.17 | |
| 201 | 779 | 01, 02 (Colon, High Met vs. Colon, Low Met) | 27 | 54 | | 2.17 |
| | | 03, 04 (Breast, High Met vs. Breast, Non-Met) | 60 | 22 | 2.66 | |
| 202 | 649143 | 15, 16 (Normal Colon vs. Colon Tumor Tissue) | 6 | 0 | 6.34 | |
| | | 15, 17 (Normal Colon Tissue vs. Colon Metastasis) | 6 | 0 | 6.44 | |
| 203 | 489 | 15, 17 (Normal Colon Tissue vs. Colon Metastasis) | 12 | 58 | | 4.5 |
| | | 15, 16 (Normal Colon vs. Colon Tumor Tissue) | 12 | 58 | | 4.57 |
| 204 | 2994 | 01, 02 (Colon, High Met vs. Colon, Low Met) | 3 | 14 | | 5.06 |
| 205 | 2994 | 01, 02 (Colon, High Met vs. Colon, Low Met) | 3 | 14 | | 5.06 |
| 206 | 11147 | 01, 02 (Colon, High Met vs. Colon, Low Met) | 0 | 6 | | 6.5 |
| 207 | 549395 | 15, 17 (Normal Colon Tissue vs. Colon Metastasis) | 2 | 13 | | 6.06 |
| | | 16, 17 (Colon Tumor Tissue vs. Colon Metastasis) | 1 | 13 | | 12.8 |
| 208 | 559806 | 16, 17 (Colon Tumor Tissue vs. Colon Metastasis) | 0 | 6 | | 5.91 |
| 209 | 452238 | 15, 16 (Normal Colon vs. Colon Tumor Tissue) | 0 | 6 | | 5.68 |
| 210 | 225914 | 16, 17 (Colon Tumor Tissue vs. Colon Metastasis) | 0 | 6 | | 5.91 |
| 211 | 463480 | 16, 17 (Colon Tumor Tissue vs. Colon Metastasis) | 0 | 6 | | 5.91 |
| 212 | 184725 | 15, 17 (Normal Colon Tissue vs. Colon Metastasis) | 8 | 0 | 8.59 | |
| | | 16, 17 (Colon Tumor Tissue vs. Colon Metastasis) | 7 | 0 | 7.11 | |
| 213 | 557401 | 15, 17 (Normal Colon Tissue vs. Colon Metastasis) | 10 | 2 | 5.37 | |
| 214 | 455155 | 15, 16 (Normal Colon vs. Colon Tumor Tissue) | 12 | 3 | 4.23 | |
| 215 | 551117 | 16, 17 (Colon Tumor Tissue vs. Colon Metastasis) | 0 | 6 | | 5.91 |
| 217 | 729295 | 15, 16 (Normal Colon vs. Colon Tumor Tissue) | 0 | 7 | | 6.62 |
| | | 16, 17 (Colon Tumor Tissue vs. Colon Metastasis) | 7 | 0 | 7.11 | |
| 218 | 450429 | 16, 17 (Colon Tumor Tissue vs. Colon Metastasis) | 10 | 1 | 10.16 | |
| | | 15, 17 (Normal Colon Tissue vs. Colon Metastasis) | 13 | 1 | 13.95 | |
| 219 | 450148 | 16, 17 (Colon Tumor Tissue vs. Colon Metastasis) | 0 | 6 | | 5.91 |
| 220 | 380412 | 15, 17 (Normal Colon Tissue vs. Colon Metastasis) | 6 | 0 | 6.44 | |
| | | 15, 16 (Normal Colon vs. Colon Tumor Tissue) | 6 | 0 | 6.34 | |
| 221 | 446614 | 16, 17 (Colon Tumor Tissue vs. Colon Metastasis) | 7 | 0 | 7.11 | |
| 222 | 555911 | 15, 17 (Normal Colon Tissue vs. Colon Metastasis) | 2 | 21 | | 9.78 |
| | | 16, 17 (Colon Tumor Tissue vs. Colon Metastasis) | 1 | 21 | | 20.68 |
| 223 | 450828 | 15, 17 (Normal Colon Tissue vs. Colon Metastasis) | 1 | 9 | | 8.38 |
| 224 | 28 | 18, 20 (Normal Colon Tissue vs. Colon Metastasis) | 2 | 11 | | 6.43 |
| | | 18, 19 (Normal Colon Tissue vs. Colon Tumor) | 2 | 43 | | 18.81 |
| | | 15, 17 (Normal Colon Tissue vs. Colon Metastasis) | 53 | 207 | | 3.64 |
| | | 03, 04 (Breast, High Met vs. Breast, Non-Met) | 697 | 1789 | | 2.63 |
| | | 19, 20 (Colon Tumor Tissue vs. Colon Metastasis) | 43 | 11 | 2.92 | |
| 225 | 446450 | 15, 16 (Normal Colon vs. Colon Tumor Tissue) | 11 | 3 | 3.88 | |
| 226 | 452026 | 15, 16 (Normal Colon vs. Colon Tumor Tissue) | 35 | 14 | 2.64 | |
| 227 | 643594 | 15, 16 (Normal Colon vs. Colon Tumor Tissue) | 7 | 0 | 7.4 | |
| | | 15, 17 (Normal Colon Tissue vs. Colon Metastasis) | 7 | 0 | 7.51 | |
| 228 | 1905 | 01, 02 (Colon, High Met vs. Colon, Low Met) | 7 | 21 | | 3.25 |
| | | 15, 17 (Normal Colon Tissue vs. Colon Metastasis) | 0 | 7 | | 6.52 |
| 229 | 651073 | 15, 17 (Normal Colon Tissue vs. Colon Metastasis) | 7 | 0 | 7.51 | |
| | | 15, 16 (Normal Colon vs. Colon Tumor Tissue) | 7 | 0 | 7.4 | |
| 230 | 553705 | 15, 16 (Normal Colon vs. Colon Tumor Tissue) | 12 | 0 | 12.68 | |
| 231 | 521840 | 15, 16 (Normal Colon vs. Colon Tumor Tissue) | 6 | 0 | 6.34 | |
| 232 | 648689 | 16, 17 (Colon Tumor Tissue vs. Colon Metastasis) | 6 | 0 | 6.09 | |
| 233 | 447858 | 15, 16 (Normal Colon vs. Colon Tumor Tissue) | 12 | 3 | 4.23 | |
| 234 | 556198 | 15, 16 (Normal Colon vs. Colon Tumor Tissue) | 0 | 6 | | 5.68 |
| 235 | 394436 | 15, 17 (Normal Colon Tissue vs. Colon Metastasis) | 7 | 0 | 7.51 | |
| 236 | 639651 | 15, 17 (Normal Colon Tissue vs. Colon Metastasis) | 6 | 0 | 6.44 | |
| 237 | 499424 | 15, 16 (Normal Colon vs. Colon Tumor Tissue) | 0 | 8 | | 7.57 |
| 238 | 468109 | 15, 17 (Normal Colon Tissue vs. Colon Metastasis) | 6 | 0 | 6.44 | |
| 239 | 185701 | 03, 04 (Breast, High Met vs. Breast, Non-Met) | 0 | 6 | | 6.15 |
| 240 | 451811 | 15, 17 (Normal Colon Tissue vs. Colon Metastasis) | 10 | 2 | 5.37 | |
| 241 | 730670 | 16, 17 (Colon Tumor Tissue vs. Colon Metastasis) | 6 | 0 | 6.09 | |
| | | 15, 16 (Normal Colon vs. Colon Tumor Tissue) | 0 | 6 | | 5.68 |
| 242 | 172013 | 15, 16 (Normal Colon vs. Colon Tumor Tissue) | 6 | 0 | 6.34 | |
| 243 | 449142 | 16, 17 (Colon Tumor Tissue vs. Colon Metastasis) | 9 | 1 | 9.14 | |
| 244 | 446964 | 15, 17 (Normal Colon Tissue vs. Colon Metastasis) | 1 | 10 | | 9.32 |
| 245 | 414739 | 16, 17 (Colon Tumor Tissue vs. Colon Metastasis) | 2 | 14 | | 6.89 |
| | | 15, 17 (Normal Colon Tissue vs. Colon Metastasis) | 2 | 14 | | 6.52 |
| 246 | 641124 | 15, 17 (Normal Colon Tissue vs. Colon Metastasis) | 6 | 0 | 6.44 | |
| 247 | 555702 | 15, 16 (Normal Colon vs. Colon Tumor Tissue) | 11 | 2 | 5.81 | |
| 248 | 549435 | 15, 16 (Normal Colon vs. Colon Tumor Tissue) | 14 | 2 | 7.4 | |
| 249 | 643954 | 16, 17 (Colon Tumor Tissue vs. Colon Metastasis) | 6 | 0 | 6.09 | |
| 250 | 5984 | 16, 17 (Colon Tumor Tissue vs. Colon Metastasis) | 0 | 6 | | 5.91 |
| 251 | 560526 | 16, 17 (Colon Tumor Tissue vs. Colon Metastasis) | 0 | 8 | | 7.88 |
| 252 | 411113 | 16, 17 (Colon Tumor Tissue vs. Colon Metastasis) | 0 | 6 | | 5.91 |
| 253 | 7607 | 15, 16 (Normal Colon vs. Colon Tumor Tissue) | 13 | 4 | 3.44 | |
| | | 01, 02 (Colon, High Met vs. Colon, Low Met) | 0 | 7 | | 7.59 |
| | | 15, 17 (Normal Colon Tissue vs. Colon Metastasis) | 13 | 3 | 4.65 | |
| 254 | 559409 | 16, 17 (Colon Tumor Tissue vs. Colon Metastasis) | 0 | 6 | | 5.91 |
| 255 | 650053 | 15, 16 (Normal Colon vs. Colon Tumor Tissue) | 10 | 1 | 10.57 | |
| | | 15, 17 (Normal Colon Tissue vs. Colon Metastasis) | 10 | 0 | 10.73 | |
| 256 | 448511 | 15, 17 (Normal Colon Tissue vs. Colon Metastasis) | 3 | 26 | | 8.07 |
| | | 16, 17 (Colon Tumor Tissue vs. Colon Metastasis) | 4 | 26 | | 6.4 |
| 257 | 642142 | 16, 17 (Colon Tumor Tissue vs. Colon Metastasis) | 11 | 0 | 11.17 | |
| | | l5, 16 (Normal Colon vs. Colon Tumor Tissue) | 2 | 11 | | 5.2 |
| 258 | 470462 | 15, 17 (Normal Colon Tissue vs. Colon Metastasis) | 7 | 0 | 7.51 | |
| 259 | 431601 | 18, 20 (Normal Colon Tissue vs. Colon Metastasis) | 9 | 0 | 7.69 | |
| | | 15, 17 (Normal Colon Tissue vs. Colon Metastasis) | 28 | 9 | 3.34 | |
| | | 15, 16 (Normal Colon vs. Colon Tumor Tissue) | 28 | 6 | 4.93 | |
| | | 08, 09 (Lung, High Met vs. Lung, Low Met) | 5 | 0 | 6.99 | |
| 260 | 421431 | 15, 16 (Normal Colon vs. Colon Tumor Tissue) | 8 | 1 | 8.46 | |
| 261 | 284586 | 15, 17 (Normal Colon Tissue vs. Colon Metastasis) | 6 | 0 | 6.44 | |
| 262 | 556198 | 15, 16 (Normal Colon vs. Colon Tumor Tissue) | 0 | 6 | | 5.68 |
| 263 | 431601 | 18, 20 (Normal Colon Tissue vs. Colon Metastasis) | 9 | 0 | 7.69 | |
| | | 08, 09 (Lung, High Met vs. Lung, Low Met) | 5 | 0 | 6.99 | |
| | | 15, 16 (Normal Colon vs. Colon Tumor Tissue) | 28 | 6 | 4.93 | |
| | | 15, 17 (Normal Colon Tissue vs. Colon Metastasis) | 28 | 9 | 3.34 | |
| 264 | 449891 | 15, 16 (Normal Colon vs. Colon Tumor Tissue) | 8 | 1 | 8.46 | |
| 265 | 556561 | 15, 17 (Normal Colon Tissue vs. Colon Metastasis) | 0 | 10 | | 9.32 |
| | | 16, 17 (Colon Tumor Tissue vs. Colon Metastasis) | 1 | 10 | | 9.85 |
| 266 | 554188 | 15, 16 (Normal Colon vs. Colon Tumor Tissue) | 6 | 0 | 6.34 | |
| 267 | 3247 | 01, 02 (Colon, High Met vs. Colon, Low Met) | 1 | 20 | | 21.68 |
| | | 16, 17 (Colon Tumor Tissue vs. Colon Metastasis) | 7 | 26 | | 3.66 |
| | | 15, 17 (Normal Colon Tissue vs. Colon Metastasis) | 4 | 26 | | 6.06 |
| 268 | 546705 | 16, 17 (Colon Tumor Tissue vs. Colon Metastasis) | 0 | 6 | | 5.91 |
| 269 | 560984 | 16, 17 (Colon Tumor Tissue vs. Colon Metastasis) | 0 | 6 | | 5.91 |
| 270 | 455820 | 16, 17 (Colon Tumor Tissue vs. Colon Metastasis) | 0 | 7 | | 6.89 |
| 271 | 643129 | 15, 17 (Normal Colon Tissue vs. Colon Metastasis) | 7 | 0 | 7.51 | |
| 272 | 454653 | 15, 17 (Normal Colon Tissue vs. Colon Metastasis) | 3 | 17 | | 5.28 |
| | | 16, 17 (Colon Tumor Tissue vs. Colon Metastasis) | 5 | 17 | | 3.35 |
| 273 | 456549 | 16, 17 (Colon Tumor Tissue vs. Colon Metastasis) | 1 | 8 | | 7.88 |
| 274 | 454806 | 15, 16 (Normal Colon vs. Colon Tumor Tissue) | 10 | 2 | 5.28 | |
| 275 | 724296 | 15, 16 (Normal Colon vs. Colon Tumor Tissue) | 0 | 128 | | 121.1 |
| | | 16, 17 (Colon Tumor Tissue vs. Colon Metastasis) | 128 | 0 | 129.99 | |
| 276 | 559280 | 15, 16 (Normal Colon vs. Colon Tumor Tissue) | 0 | 7 | | 6.62 |
| 277 | 171511 | 16, 17 (Colon Tumor Tissue vs. Colon Metastasis) | 7 | 0 | 7.11 | |
| | | 15, 16 (Normal Colon vs. Colon Tumor Tissue) | 0 | 7 | | 6.62 |
| 278 | 644242 | 15, 17 (Normal Colon Tissue vs. Colon Metastasis) | 6 | 0 | 6.44 | |
| | | 15, 16 (Normal Colon vs. Colon Tumor Tissue) | 6 | 0 | 6.34 | |
| 279 | 734370 | 15, 16 (Normal Colon vs. Colon Tumor Tissue) | 0 | 11 | | 10.41 |
| | | 16, 17 (Colon Tumor Tissue vs. Colon Metastasis) | 11 | 0 | 11.17 | |
| 280 | 639459 | 15, 17 (Normal Colon Tissue vs. Colon Metastasis) | 11 | 0 | 11.81 | |
| | | 16, 17 (Colon Tumor Tissue vs. Colon Metastasis) | 9 | 0 | 9.14 | |
| 281 | 641679 | 15, 17 (Normal Colon Tissue vs. Colon Metastasis) | 8 | 0 | 8.59 | |
| | | 15, 16 (Normal Colon vs. Colon Tumor Tissue) | 8 | 0 | 8.46 | |
| 282 | 644611 | 15, 16 (Normal Colon vs. Colon Tumor Tissue) | 7 | 0 | 7.4 | |
| | | 15, 17 (Normal Colon Tissue vs. Colon Metastasis) | 7 | 0 | 7.51 | |
| 283 | 550038 | 16, 17 (Colon Tumor Tissue vs. Colon Metastasis) | 0 | 7 | | 6.89 |
| | | 15, 17 (Normal Colon Tissue vs. Colon Metastasis) | 0 | 7 | | 6.52 |
| 284 | 452567 | 16, 17 (Colon Tumor Tissue vs. Colon Metastasis) | 3 | 14 | | 4.6 |
| | | 15, 16 (Normal Colon vs. Colon Tumor Tissue) | 21 | 3 | 7.4 | |
| 285 | 411113 | 16, 17 (Colon Tumor Tissue vs. Colon Metastasis) | 0 | 6 | | 5.91 |
| 286 | 650749 | 15, 17 (Normal Colon Tissue vs. Colon Metastasis) | 7 | 0 | 7.51 | |
| 287 | 558899 | 15, 16 (Normal Colon vs. Colon Tumor Tissue) | 6 | 0 | 6.34 | |
| 288 | 452986 | 15, 16 (Normal Colon vs. Colon Tumor Tissue) | 8 | 1 | 8.46 | |
| 289 | 393197 | 16, 17 (Colon Tumor Tissue vs. Colon Metastasis) | 7 | 0 | 7.11 | |
| 290 | 499424 | 15, 16 (Normal Colon vs. Colon Tumor Tissue) | 0 | 8 | | 7.57 |
| 291 | 21669 | 16, 17 (Colon Tumor Tissue vs. Colon Metastasis) | 0 | 7 | | 6.89 |
| 292 | 640590 | 15, 17 (Normal Colon Tissue vs. Colon Metastasis) | 9 | 0 | 9.66 | |
| | | 15, 16 (Normal Colon vs. Colon Tumor Tissue) | 9 | 1 | 9.51 | |
| 293 | 549936 | 16, 17 (Colon Tumor Tissue vs. Colon Metastasis) | 0 | 6 | | 5.91 |
| 294 | 448770 | 15, 17 (Normal Colon Tissue vs. Colon Metastasis) | 6 | 0 | 6.44 | |
| 295 | 559280 | 15, 16 (Normal Colon vs. Colon Tumor Tissue) | 0 | 7 | | 6.62 |
| 296 | 648934 | 15, 16 (Normal Colon vs. Colon Tumor Tissue) | 8 | 0 | 8.46 | |
| | | 15, 17 (Normal Colon Tissue vs. Colon Metastasis) | 8 | 0 | 8.59 | |
| 297 | 452685 | 15, 16 (Normal Colon vs. Colon Tumor Tissue) | 15 | 5 | 3.17 | |
| 298 | 456549 | 16, 17 (Colon Tumor Tissue vs. Colon Metastasis) | 1 | 8 | | 7.88 |
| 299 | 446614 | 16, 17 (Colon Tumor Tissue vs. Colon Metastasis) | 7 | 0 | 7.11 | |
| 300 | 559280 | 15, 16 (Normal Colon vs. Colon Tumor Tissue) | 0 | 7 | | 6.62 |
| 301 | 446673 | 16, 17 (Colon Tumor Tissue vs. Colon Metastasis) | 8 | 1 | 8.12 | |
| 302 | 562550 | 16, 17 (Colon Tumor Tissue vs. Colon Metastasis) | 0 | 6 | | 5.91 |
| 303 | 467288 | 15, 16 (Normal Colon vs. Colon Tumor Tissue) | 6 | 0 | 6.34 | |
| | | 15, 17 (Normal Colon Tissue vs. Colon Metastasis) | 6 | 0 | 6.44 | |
| 304 | 463824 | 15, 16 (Normal Colon vs. Colon Tumor Tissue) | 6 | 0 | 6.34 | |
| | | 15, 17 (Normal Colon Tissue vs. Colon Metastasis) | 6 | 0 | 6.44 | |
| 305 | 393197 | 16, 17 (Colon Tumor Tissue vs. Colon Metastasis) | 7 | 0 | 7.11 | |
| 306 | 407077 | 15, 17 (Normal Colon Tissue vs. Colon Metastasis) | 0 | 8 | | 7.45 |
| | | 16, 17 (Colon Tumor Tissue vs. Colon Metastasis) | 1 | 8 | | 7.88 |
| 307 | 499424 | 15, 16 (Normal Colon vs. Colon Tumor Tissue) | 0 | 8 | | 7.57 |
| 308 | 554500 | 15, 16 (Normal Colon vs. Colon Tumor Tissue) | 6 | 0 | 6.34 | |
| 309 | 730143 | 15, 16 (Normal Colon vs. Colon Tumor Tissue) | 0 | 7 | | 6.62 |
| | | 16, 17 (Colon Tumor Tissue vs. Colon Metastasis) | 7 | 0 | 7.11 | |
| 310 | 595506 | 15, 16 (Normal Colon vs. Colon Tumor Tissue) | 0 | 6 | | 5.68 |
| 311 | 2334 | 15, 16 (Normal Colon vs. Colon Tumor Tissue) | 0 | 6 | | 5.68 |
| 312 | 647444 | 15, 17 (Normal Colon Tissue vs. Colon Metastasis) | 7 | 0 | 7.51 | |
| 313 | 380291 | 15, 16 (Normal Colon vs. Colon Tumor Tissue) | 6 | 0 | 6.34 | |
| 314 | 644849 | 15, 17 (Normal Colon Tissue vs. Colon Metastasis) | 8 | 0 | 8.59 | |
| 315 | 449457 | 15, 17 (Normal Colon Tissue vs. Colon Metastasis) | 0 | 7 | | 6.52 |
| 316 | 446673 | 16, 17 (Colon Tumor Tissue vs. Colon Metastasis) | 8 | 1 | 8.12 | |
| 317 | 549069 | 15, 16 (Normal Colon vs. Colon Tumor Tissue) | 11 | 56 | | 4.82 |
| | | 15, 17 (Normal Colon Tissue vs. Colon Metastasis) | 11 | 36 | | 3.05 |
| 318 | 728884 | 16, 17 (Colon Tumor Tissue vs. Colon Metastasis) | 8 | 0 | 8.12 | |
| | | 15, 16 (Normal Colon vs. Colon Tumor Tissue) | 0 | 8 | | 7.57 |
| 319 | 415058 | 16, 17 (Colon Tumor Tissue vs. Colon Metastasis) | 0 | 6 | | 5.91 |
| 320 | 553955 | 16, 17 (Colon Tumor Tissue vs. Colon Metastasis) | 0 | 6 | | 5.91 |
| 321 | 455820 | 16, 17 (Colon Tumor Tissue vs. Colon Metastasis) | 0 | 7 | | 6.89 |
| 322 | 549617 | 15, 16 (Normal Colon vs. Colon Tumor Tissue) | 0 | 6 | | 5.68 |
| 323 | 449831 | 16, 17 (Colon Tumor Tissue vs. Colon Metastasis) | 0 | 10 | | 9.85 |
| 324 | 451580 | 16, 17 (Colon Tumor Tissue vs. Colon Metastasis) | 0 | 6 | | 5.91 |
| 325 | 558899 | 15, 16 (Normal Colon vs. Colon Tumor Tissue) | 6 | 0 | 6.34 | |
| 326 | 562292 | 16, 17 (Colon Tumor Tissue vs. Colon Metastasis) | 0 | 6 | | 5.91 |
| 327 | 5830 | 15, 16 (Normal Colon vs. Colon Tumor Tissue) | 0 | 7 | | 6.62 |
| | | 16, 17 (Colon Tumor Tissue vs. Colon Metastasis) | 7 | 0 | 7.11 | |
| 328 | 8953 | 03, 04 (Breast, High Met vs. Breast, Non-Met) | 0 | 13 | | 13.32 |
| 329 | 8012 | 03, 04 (Breast, High Met vs. Breast, Non-Met) | 7 | 0 | 6.83 | |
| 330 | 185718 | 03, 04 (Breast, High Met vs. Breast, Non-Met) | 0 | 6 | | 6.15 |
| 331 | 729851 | 16, 17 (Colon Tumor Tissue vs. Colon Metastasis) | 7 | 0 | 7.11 | |
| | | 15, 16 (Normal Colon vs. Colon Tumor Tissue) | 0 | 7 | | 6.62 |
| 332 | 185597 | 03, 04 (Breast, High Met vs. Breast, Non-Met) | 0 | 8 | | 8.2 |
| 333 | 9887 | 03, 04 (Breast, High Met vs. Breast, Non-Met) | 7 | 0 | 6.83 | |
| 334 | 725825 | 15, 16 (Normal Colon vs. Colon Tumor Tissue) | 0 | 8 | | 7.57 |
| | | 16, 17 (Colon Tumor Tissue vs. Colon Metastasis) | 8 | 0 | 8.12 | |
| 335 | 6545 | 03, 04 (Breast, High Met vs. Breast, Non-Met) | 0 | 9 | | 9.22 |
| 336 | 21205 | 03, 04 (Breast, High Met vs. Breast, Non-Met) | 1 | 9 | | 9.22 |
| 337 | 8867 | 03, 04 (Breast, High Met vs. Breast, Non-Met) | 6 | 0 | 5.85 | |
| 338 | 729295 | 15, 16 (Normal Colon vs. Colon Tumor Tissue) | 0 | 7 | | 6.62 |
| | | 16, 17 (Colon Tumor Tissue vs. Colon Metastasis) | 7 | 0 | 7.11 | |
| 339 | 730430 | 15, 16 (Normal Colon vs. Colon Tumor Tissue) | 0 | 8 | | 7.57 |
| | | 16, 17 (Colon Tumor Tissue vs. Colon Metastasis) | 8 | 0 | 8.12 | |
| 340 | 7072 | 03, 04 (Breast, High Met vs. Breast, Non-Met) | 10 | 1 | 9.76 | |
| 341 | 730533 | 16, 17 (Colon Tumor Tissue vs. Colon Metastasis) | 7 | 0 | 7.11 | |
| | | 15, 16 (Normal Colon vs. Colon Tumor Tissue) | 0 | 7 | | 6.62 |
| 342 | 9121 | 01, 02 (Colon, High Met vs. Colon, Low Met) | 0 | 7 | | 7.59 |
| 343 | 11131 | 01, 02 (Colon, High Met vs. Colon, Low Met) | 0 | 6 | | 6.5 |
| 344 | 640116 | 15, 16 (Normal Colon vs. Colon Tumor Tissue) | 19 | 4 | 5.02 | |
| | | 15, 17 (Normal Colon Tissue vs. Colon Metastasis) | 19 | 0 | 20.39 | |
| 345 | 730282 | 16, 17 (Colon TumorTissue vs. Colon Metastasis) | 7 | 0 | 7.11 | |
| | | 15, 16 (Normal Colon vs. Colon Tumor Tissue) | 0 | 7 | | 6.62 |
| 346 | 550571 | 16, 17 (Colon Tumor Tissue vs. Colon Metastasis) | 0 | 6 | | 5.91 |
| 347 | 1183 | 01, 02 (Colon, High Met vs. Colon, Low Met) | 4 | 71 | | 19.24 |
| | | 03, 04 (Breast, High Met vs. Breast, Non-Met) | 32 | 15 | 2.08 | |
| 348 | 449437 | 15, 16 (Normal Colon vs. Colon Tumor Tissue) | 14 | 3 | 4.93 | |
| | | 16, 17 (Colon Tumor Tissue vs. Colon Metastasis) | 3 | 12 | | 3.94 |
| 349 | 8966 | 03, 04 (Breast, High Met vs. Breast, Non-Met) | 0 | 7 | | 7.17 |
| 350 | 6134 | 18, 20 (Normal Colon Tissue vs. Colon Metastasis) | 22 | 5 | 3.76 | |
| | | 15, 17 (Normal Colon Tissue vs. Colon Metastasis) | 142 | 40 | 3.81 | |
| | | 15, 16 (Normal Colon vs. Colon Tumor Tissue) | 142 | 42 | 3.57 | |
| | | 19, 20 (Colon Tumor Tissue vs. Colon Metastasis) | 22 | 5 | 3.29 | |
| 351 | 95700 | 03, 04 (Breast, High Met vs. Breast, Non-Met) | 1 | 21 | | 21.52 |
| 352 | 7066 | 01, 02 (Colon, High Met vs. Colon, Low Met) | 0 | 9 | | 9.76 |
| 353 | 648310 | 15, 17 (Normal Colon Tissue vs. Colon Metastasis) | 6 | 0 | 6.44 | |
| | | 15, 16 (Normal Colon vs. Colon Tumor Tissue) | 6 | 0 | 6.34 | |
| 354 | 730059 | 16, 17 (Colon Tumor Tissue vs. Colon Metastasis) | 6 | 0 | 6.09 | |
| | | 15, 16 (Normal Colon vs. Colon Tumor Tissue) | 0 | 6 | | 5.68 |
| 355 | 736014 | 15, 16 (Normal Colon vs. Colon Tumor Tissue) | 0 | 6 | | 5.68 |
| | | 16, 17 (Colon Tumor Tissue vs. Colon Metastasis) | 6 | 0 | 6.09 | |
| 356 | 646577 | 16, 17 (Colon Tumor Tissue vs. Colon Metastasis) | 6 | 0 | 6.09 | |
| 357 | 732254 | 15, 16 (Normal Colon vs. Colon Tumor Tissue) | 0 | 6 | | 5.68 |
| | | 16, 17 (Colon Tumor Tissue vs. Colon Metastasis) | 6 | 0 | 6.09 | |
| | | 23, 24 (Normal Lung Tissue vs. Lung Tumor Tissue) | 0 | 8 | | 7.92 |
| 358 | 7037 | 01, 02 (Colon, High Met vs. Colon, Low Met) | 0 | 9 | | 9.76 |
| 359 | 7037 | 01, 02 (Colon, High Met vs. Colon, Low Met) | 0 | 9 | | 9.76 |
| 360 | 6937 | 03, 04 (Breast, High Met vs. Breast, Non-Met) | 10 | 0 | 9.76 | |
| 361 | 7572 | 01, 02 (Colon, High Met vs. Colon, Low Met) | 0 | 8 | | 8.67 |
| 362 | 388085 | 15, 17 (Normal Colon Tissue vs. Colon Metastasis) | 9 | 0 | 9.66 | |
| | | 15, 16 (Normal Colon vs. Colon Tumor Tissue) | 9 | 0 | 9.51 | |
| 363 | 2676 | 01, 02 (Colon, High Met vs. Colon, Low Met) | 2 | 17 | | 9.22 |
| 364 | 639240 | 15, 16 (Normal Colon vs. Colon Tumor Tissue) | 9 | 0 | 9.51 | |
| | | 15, 17 (Normal Colon Tissue vs. Colon Metastasis) | 9 | 0 | 9.66 | |
| 365 | 650472 | 15, 17 (Normal Colon Tissue vs. Colon Metastasis) | 6 | 0 | 6.44 | |
| 366 | 727789 | 16, 17 (Colon Tumor Tissue vs. Colon Metastasis) | 6 | 0 | 6.09 | |
| | | 15, 16 (Normal Colon vs. Colon Tumor Tissue) | 0 | 6 | | 5.68 |
| 367 | 2495 | 03, 04 (Breast, High Met vs. Breast, Non-Met) | 27 | 5 | 5.27 | |
| | | 08, 09 (Lung, High Met vs. Lung, Low Met) | 13 | 2 | 9.08 | |
| 368 | 732254 | 16, 17 (Colon Tumor Tissue vs. Colon Metastasis) | 6 | 0 | 6.09 | |
| | | 15, 16 (Normal Colon vs. Colon Tumor Tissue) | 0 | 6 | | 5.68 |
| | | 23, 24 (Normal Lung Tissue vs. Lung Tumor Tissue) | 0 | 8 | | 7.92 |
| 369 | 5268 | 01, 02 (Colon, High Met vs. Colon, Low Met) | 0 | 15 | | 16.26 |
| 370 | 11881 | 03, 04 (Breast, High Met vs. Breast, Non-Met) | 6 | 0 | 5.85 | |
| 371 | 448677 | 15, 16 (Normal Colon vs. Colon Tumor Tissue) | 11 | 1 | 11.63 | |
| 372 | 1876 | 03, 04 (Breast, High Met vs. Breast, Non-Met) | 15 | 3 | 4.88 | |
| 373 | 3441 | 01, 02 (Colon, High Met vs. Colon, Low Met) | 4 | 13 | | 3.52 |
| | | 03, 04 (Breast, High Met vs. Breast, Non-Met) | 8 | 0 | 7.81 | |
| 374 | 726134 | 15, 16 (Normal Colon vs. Colon Tumor Tissue) | 0 | 8 | | 7.57 |
| | | 16, 17 (Colon Tumor Tissue vs. Colon Metastasis) | 8 | 0 | 8.12 | |
| 375 | 9048 | 01, 02 (Colon, High Met vs. Colon, Low Met) | 7 | 0 | 6.46 | |
| 376 | 26489 | 03, 04 (Breast, High Met vs. Breast, Non-Met) | 1 | 8 | | 8.2 |
| 377 | 644205 | 15, 17 (Normal Colon Tissue vs. Colon Metastasis) | 7 | 0 | 7.51 | |
| | | 15, 16 (Normal Colon vs. Colon Tumor Tissue) | 7 | 0 | 7.4 | |
| 378 | 468689 | 15, 17 (Normal Colon Tissue vs. Colon Metastasis) | 6 | 0 | 6.44 | |
| | | 15, 16 (Normal Colon vs. Colon Tumor Tissue) | 6 | 0 | 6.34 | |
| 379 | 638971 | 15, 17 (Normal Colon Tissue vs. Colon Metastasis) | 8 | 0 | 8.59 | |
| 380 | 10274 | 03, 04 (Breast, High Met vs. Breast, Non-Met) | 0 | 7 | | 7.17 |
| 381 | 6725 | 03, 04 (Breast, High Met vs. Breast, Non-Met) | 10 | 0 | 9.76 | |
| 382 | 2488 | 15, 17 (Normal Colon Tissue vs. Colon Metastasis) | 0 | 8 | | 7.45 |
| 383 | 8366 | 21, 22 (Normal Prostate vs. Prostate Cancer) (Normal Prostate vs. | 2 | 15 | | 7.63 |
| | | Prostate Cancer) | | | | |
| | | 03, 04 (Breast, High Met vs. Breast, Non-Met) | 15 | 2 | 7.32 | |
| 384 | 502683 | 15, 16 (Normal Colon vs. Colon Tumor Tissue) | 6 | 0 | 6.34 | |
| 385 | 450914 | 15, 16 (Normal Colon vs. Colon Tumor Tissue) | 0 | 6 | | 5.68 |
| 386 | 21205 | 03, 04 (Breast, High Met vs. Breast, Non-Met) | 1 | 9 | | 9.22 |
| 387 | 644205 | 15, 16 (Normal Colon vs. Colon Tumor Tissue) | 7 | 0 | 7.4 | |
| | | 15, 17 (Normal Colon Tissue vs. Colon Metastasis) | 7 | 0 | 7.51 | |
| 388 | 5268 | 01, 02 (Colon, High Met vs. Colon, Low Met) | 0 | 15 | | 16.26 |
| 389 | 8012 | 03, 04 (Breast, High Met vs. Breast, Non-Met) | 7 | 0 | 6.83 | |
| 390 | 11270 | 01, 02 (Colon, High Met vs. Colon, Low Met) | 0 | 6 | | 65 |
| 391 | 10924 | 03, 04 (Breast, High Met vs. Breast, Non-Met) | 6 | 0 | 5.85 | |
| 393 | 3650 | 03, 04 (Breast, High Met vs. Breast, Non-Met) | 10 | 2 | 4.88 | |
| 394 | 1655 | 01, 02 (Colon, High Met vs. Colon, Low Met) | 67 | 2 | 30.9 | |
| | | 21, 22 (Normal Prostate vs. Prostate Cancer) | 116 | 51 | 2.24 | |
| | | 03, 04 (Breast, High Met vs. Breast, Non-Met) | 0 | 58 | | 59.45 |
| 395 | 3275 | 03, 04 (Breast, High Met vs. Breast, Non-Met) | 8 | 0 | 7.81 | |
| 396 | 3355 | 03, 04 (Breast, High Met vs. Breast, Non-Met) | 21 | 7 | 2.93 | |
| 397 | 2078 | 03, 04 (Breast, High Met vs. Breast, Non-Met) | 11 | 2 | 5.37 | |
| 398 | 4809 | 08, 09 (Lung, High Met vs. Lung, Low Met) | 3 | 27 | | 6.44 |
| | | 01, 02 (Colon, High Met vs. Colon, Low Met) | 15 | 1 | 13.84 | |
| 399 | 6402 | 03, 04 (Breast, High Met vs. Breast, Non-Met) | 10 | 0 | 9.76 | |
| 400 | 555244 | 16, 17 (Colon Tumor Tissue vs. Colon Metastasis) | 0 | 11 | | 10.83 |
| 401 | 548965 | 16, 17 (Colon Tumor Tissue vs. Colon Metastasis) | 4 | 14 | | 3.45 |
| 402 | 4747 | 01, 02 (Colon, High Met vs. Colon, Low Met) | 2 | 10 | | 5.42 |
| 403 | 40208 | 03, 04 (Breast, High Met vs. Breast, Non-Met) | 0 | 6 | | 6.15 |
| 404 | 14596 | 08, 09 (Lung, High Met vs. Lung, Low Met) | 14 | 6 | 3.26 | |
| | | 03, 04 (Breast, High Met vs. Breast, Non-Met) | 1 | 17 | | 17.42 |
| 405 | 7110 | 03, 04 (Breast, High Met vs. Breast, Non-Met) | 4 | 19 | | 4.87 |
| 406 | 7110 | 03, 04 (Breast, High Met vs. Breast, Non-Met) | 4 | 19 | | 4.87 |
| 407 | 6592 | 03, 04 (Breast, High Met vs. Breast, Non-Met) | 12 | 1 | 11.71 | |
| 408 | 6455 | 03, 04 (Breast, High Met vs. Breast, Non-Met) | 6 | 0 | 5.85 | |
| 409 | 2738 | 03, 04 (Breast, High Met vs. Breast, Non-Met) | 15 | 4 | 3.66 | |
| 410 | 696 | 03, 04 (Breast, High Met vs. Breast, Non-Met) | 37 | 13 | 2.78 | |
| | | 01, 02 (Colon, High Met vs. Colon, Low Met) | 24 | 87 | | 3.93 |
| 411 | 379186 | 16, 17 (Colon Tumor Tissue vs. Colon Metastasis) | 6 | 0 | 6.09 | |
| 412 | 1588 | 03, 04 (Breast, High Met vs. Breast, Non-Met) | 15 | 95 | | 6.49 |
| | | 01, 02 (Colon, High Met vs. Colon, Low Met) | 45 | 19 | 2.18 | |
| 413 | 7007 | 01, 02 (Colon, High Met vs. Colon, Low Met) | 0 | 9 | | 9.76 |
| 414 | 9025 | 01, 02 (Colon, High Met vs. Colon, Low Met) | 7 | 0 | 6.46 | |
| 415 | 650749 | 15, 17 (Normal Colon Tissue vs. Colon Metastasis) | 7 | 0 | 7.51 | |
| 416 | 553158 | 16, 17 (Colon Tumor Tissue vs. Colon Metastasis) | 1 | 8 | | 7.88 |
| 417 | 641703 | 15, 17 (Normal Colon Tissue vs. Colon Metastasis) | 12 | 0 | 12.88 | |
| 418 | 833 | 15, 16 (Normal Colon vs. Colon Tumor Tissue) | 12 | 3 | 4.23 | |
| | | 08, 09 (Lung, High Met vs. Lung, Low Met) | 18 | 9 | 2.79 | |
| | | 03, 04 (Breast, High Met vs. Breast, Non-Met) | 16 | 3 | 5.2 | |
| 419 | 649259 | 15, 16 (Normal Colon vs. Colon Tumor Tissue) | 7 | 0 | 7.4 | |
| | | 15, 17 (Normal Colon Tissue vs. Colon Metastasis) | 7 | 0 | 7.51 | |
| 420 | 451179 | 15, 17 (Normal Colon Tissue vs. Colon Metastasis) | 1 | 9 | | 8.38 |
| 421 | 9505 | 03, 04 (Breast, High Met vs. Breast, Non-Met) | 3 | 15 | | 5.12 |
| 422 | 736728 | 16, 17 (Colon Tumor Tissue vs. Colon Metastasis) | 6 | 0 | 6.09 | |
| | | 15, 16 (Normal Colon vs. Colon Tumor Tissue) | 0 | 6 | | 5.68 |
| 423 | 380412 | 15, 16 (Normal Colon vs. Colon Tumor Tissue) | 6 | 0 | 6.34 | |
| | | 15, 17 (Normal Colon Tissue vs. Colon Metastasis) | 6 | 0 | 6.44 | |
| 424 | 642425 | 15, 17 (Normal Colon Tissue vs. Colon Metastasis) | 6 | 0 | 6.44 | |
| 425 | 405073 | 15, 17 (Normal Colon Tissue vs. Colon Metastasis) | 6 | 0 | 6.44 | |
| | | 15, 16 (Normal Colon vs. Colon Tumor Tissue) | 6 | 0 | 6.34 | |
| 426 | 174250 | 16, 17 (Colon Tumor Tissue vs. Colon Metastasis) | 2 | 13 | | 6.4 |
| 427 | 726281 | 15, 16 (Normal Colon vs. Colon Tumor Tissue) | 0 | 7 | | 6.62 |
| | | 16, 17 (Colon Tumor Tissue vs. Colon Metastasis) | 7 | 0 | 7.11 | |
| 428 | 639029 | 15, 17 (Normal Colon Tissue vs. Colon Metastasis) | 6 | 0 | 6.44 | |
| 429 | 452245 | 16, 17 (Colon Tumor Tissue vs. Colon Metastasis) | 1 | 12 | | 11.82 |
| | | 15, 17 (Normal Colon Tissue vs. Colon Metastasis) | 1 | 12 | | 11.18 |
| 430 | 510254 | 15, 16 (Normal Colon vs. Colon Tumor Tissue) | 17 | 1 | 17.97 | |
| | | 16, 17 (Colon Tumor Tissue vs. Colon Metastasis) | 1 | 8 | | 7.88 |
| 431 | 642425 | 15, 17 (Normal Colon Tissue vs. Colon Metastasis) | 6 | 0 | 6.44 | |
| 432 | 51939 | 15, 16 (Normal Colon vs. Colon Tumor Tissue) | 28 | 3 | 9.87 | |
| | | 15, 17 (Normal Colon Tissue vs. Colon Metastasis) | 28 | 0 | 30.05 | |
| 433 | 7379 | 01, 02 (Colon, High Met vs. Colon, Low Met) | 0 | 6 | | 6.5 |
| 434 | 546632 | 16, 17 (Colon Tumor Tissue vs. Colon Metastasis) | 15 | 0 | 15.23 | |
| | | 23, 24 (Normal Lung Tissue vs. Lung Tumor Tissue) | 3 | 34 | | 11.22 |
| 435 | 734827 | 16, 17 (Colon Tumor Tissue vs. Colon Metastasis) | 7 | 0 | 7.11 | |
| | | 15, 16 (Normal Colon vs. Colon Tumor Tissue) | 0 | 7 | | 6.62 |
| 436 | 2554 | 03, 04 (Breast, High Met vs. Breast, Non-Met) | 20 | 7 | 2.79 | |
| 437 | 643285 | 16, 17 (Colon Tumor Tissue vs. Colon Metastasis) | 9 | 0 | 9.14 | |
| 438 | 448770 | 15, 17 (Normal Colon Tissue vs. Colon Metastasis) | 6 | 0 | 6.44 | |
| 439 | 375380 | 15, 17 (Normal Colon Tissue vs. Colon Metastasis) | 1 | 9 | | 8.38 |
| | | 16, 17 (Colon Tumor Tissue vs. Colon Metastasis) | 0 | 9 | | 8.86 |
| 440 | 726134 | 16, 17 (Colon Tumor Tissue vs. Colon Metastasis) | 8 | 0 | 8.12 | |
| | | 15, 16 (Normal Colon vs. Colon Tumor Tissue) | 0 | 8 | | 7.57 |
| 441 | 422687 | 16, 17 (Colon Tumor Tissue vs. Colon Metastasis) | 10 | 0 | 10.16 | |
| | | 15, 16 (Normal Colon vs. Colon Tumor Tissue) | 0 | 10 | | 9.46 |
| 442 | 448436 | 16, 17 (Colon Tumor Tissue vs. Colon Metastasis) | 20 | 2 | 10.16 | |
| | | 15, 16 (Normal Colon vs. Colon Tumor Tissue) | 4 | 20 | | 4.73 |
| 443 | 644893 | 16, 17 (Colon Tumor Tissue vs. Colon Metastasis) | 6 | 0 | 6.09 | |
| 444 | 559104 | 15, 16 (Normal Colon vs. Colon Tumor Tissue) | 0 | 6 | | 5.68 |
| 445 | 551172 | 15, 16 (Normal Colon vs. Colon Tumor Tissue) | 1 | 10 | | 9.46 |
| 446 | 724296 | 15, 16 (Normal Colon vs. Colon Tumor Tissue) | 0 | 128 | | 121.1 |
| | | 16, 17 (Colon Tumor Tissue vs. Colon Metastasis) | 128 | 0 | 129.99 | |
| 447 | 735936 | 15, 16 (Normal Colon vs. Colon Tumor Tissue) | 0 | 9 | | 8.51 |
| | | 16, 17 (Colon Tumor Tissue vs. Colon Metastasis) | 9 | 0 | 9.14 | |
| 448 | 556326 | 16, 17 (Colon Tumor Tissue vs. Colon Metastasis) | 0 | 8 | | 7.88 |
| 449 | 729699 | 15, 16 (Normal Colon vs. Colon Tumor Tissue) | 0 | 6 | | 5.68 |
| | | 16, 17 (Colon Tumor Tissue vs. Colon Metastasis) | 6 | 0 | 6.09 | |
| 450 | 550694 | 15, 17 (Normal Colon Tissue vs. Colon Metastasis) | 21 | 7 | 3.22 | |
| | | 15, 16 (Normal Colon vs. Colon Tumor Tissue) | 21 | 1 | 22.2 | |
| 451 | 734738 | 16, 17 (Colon Tumor Tissue vs. Colon Metastasis) | 6 | 0 | 6.09 | |
| | | 15, 16 (Normal Colon vs. Colon Tumor Tissue) | 0 | 6 | | 5.68 |
| 452 | 404502 | 15, 16 (Normal Colon vs. Colon Tumor Tissue) | 6 | 0 | 6.34 | |
| 453 | 554151 | 15, 17 (Normal Colon Tissue vs. Colon Metastasis) | 1 | 15 | | 13.97 |
| | | 15, 16 (Normal Colon vs. Colon Tumor Tissue) | 1 | 9 | | 8.51 |
| 454 | 649852 | 15, 17 (Normal Colon Tissue vs. Colon Metastasis) | 6 | 0 | 6.44 | |
| 455 | 734063 | 15, 16 (Normal Colon vs. Colon Tumour Tissue) | 0 | 7 | | 6.62 |
| | | 16, 17 (Colon Tumor Tissue vs. Colon Metastasis) | 7 | 0 | 7.11 | |
| 456 | 7279 | 01, 02 (Colon, High Met vs. Colon, Low Met) | 0 | 6 | | 6.5 |
| 457 | 2676 | 01, 02 (Colon, High Met vs. Colon, Low Met) | 2 | 17 | | 9.22 |
| 458 | 649148 | 15, 17 (Normal Colon Tissue vs. Colon Metastasis) | 8 | 0 | 8.59 | |
| 459 | 1953 | 03, 04 (Breast, High Met vs. Breast, Non-Met) | 4 | 48 | | 12.3 |
| | | 01, 02 (Colon, High Met vs. Colon, Low Met) | 39 | 13 | 2.77 | |
| 460 | 650108 | 15, 17 (Normal Colon Tissue vs. Colon Metastasis) | 9 | 0 | 9.66 | |
| 461 | 515350 | 15, 16 (Normal Colon vs. Colon Tumor Tissue) | 14 | 0 | 14.8 | |
| | | 15, 17 (Normal Colon Tissue vs. Colon Metastasis) | 14 | 3 | 5.01 | |
| 462 | 402494 | 15, 16 (Normal Colon vs. Colon Tumor Tissue) | 3 | 13 | | 4.1 |
| | | 16, 17 (Colon Tumor Tissue vs. Colon Metastasis) | 13 | 3 | 4.4 | |
| 463 | 649148 | 15, 17 (Normal Colon Tissue vs. Colon Metastasis) | 8 | 0 | 8.59 | |
| 464 | 833 | 03, 04 (Breast, High Met vs. Breast, Non-Met) | 16 | 3 | 5.2 | |
| | | 08, 09 (Lung, High Met vs. Lung, Low Met) | 18 | 9 | 2.79 | |
| | | 15, 16 (Normal Colon vs. Colon Tumor Tissue) | 12 | 3 | 4.23 | |
| 465 | 139730 | 03, 04 (Breast, High Met vs. Breast, Non-Met) | 0 | 9 | | 9.22 |
| 466 | 453079 | 16, 17 (Colon Tumor Tissue vs. Colon Metastasis) | 8 | 1 | 8.12 | |
| 467 | 546705 | 16, 17 (Colon Tumor Tissue vs. Colon Metastasis) | 0 | 6 | | 5.91 |
| 468 | 644903 | 15, 17 (Normal Colon Tissue vs. Colon Metastasis) | 7 | 0 | 7.51 | |
| 469 | 732254 | 16, 17 (Colon Tumor Tissue vs. Colon Metastasis) | 6 | 0 | 6.09 | |
| | | 15, 16 (Normal Colon vs. Colon Tumor Tissue) | 0 | 6 | | 5.68 |
| | | 23, 24 (Normal Lung Tissue vs. Lung Tumor Tissue) | 0 | 8 | | 7.92 |
| 470 | 561180 | 15, 16 (Normal Colon vs. Colon Tumor Tissue) | 11 | 2 | 5.81 | |
| 471 | 732254 | 23, 24 (Normal Lung Tissue vs. Lung Tumor Tissue) | 0 | 8 | | 7.92 |
| | | 15, 16 (Normal Colon vs. Colon Tumor Tissue) | 0 | 6 | | 5.68 |
| | | 16, 17 (Colon Tumor Tissue vs. Colon Metastasis) | 6 | 0 | 6.09 | |
| 472 | 449204 | 15, 17 (Normal Colon Tissue vs. Colon Metastasis) | 1 | 14 | | 13.04 |
| | | 16, 17 (Colon Tumor Tissue vs. Colon Metastasis) | 3 | 14 | | 4.6 |
| 473 | 185651 | 03, 04 (Breast, High Met vs. Breast, Non-Met) | 0 | 7 | | 7.17 |
| 474 | 639029 | 15, 17 (Normal Colon Tissue vs. Colon Metastasis) | 6 | 0 | 6.44 | |
| 475 | 452986 | 15, 16 (Normal Colon vs. Colon Tumor Tissue) | 8 | 1 | 8.46 | |
| 476 | 729779 | 15, 16 (Normal Colon vs. Colon Tumor Tissue) | 0 | 8 | | 7.57 |
| | | 16, 17 (Colon Tumor Tissue vs. Colon Metastasis) | 8 | 0 | 8.12 | |
| 477 | 646248 | 16, 17 (Colon Tumor Tissue vs. Colon Metastasis) | 6 | 0 | 6.09 | |
| 478 | 650448 | 15, 17 (Normal Colon Tissue vs. Colon Metastasis) | 7 | 0 | 7.51 | |
| 479 | 642049 | 15, 16 (Normal Colon vs. Colon Tumor Tissue) | 6 | 0 | 6.34 | |
| | | 15, 17 (Normal Colon Tissue vs. Colon Metastasis) | 6 | 0 | 6.44 | |
| 480 | 728273 | 16, 17 (Colon Tumor Tissue vs. Colon Metastasis) | 7 | 0 | 7.11 | |
| | | 15, 16 (Normal Colon vs. Colon Tumor Tissue) | 0 | 7 | | 6.62 |
| 481 | 446139 | 15, 16 (Normal Colon vs. Colon Tumor Tissue) | 13 | 0 | 13.74 | |
| | | 18, 19 (Normal Colon Tissue vs. Colon Tumor) | 12 | 0 | 13.71 | |
| | | 15, 17 (Normal Colon Tissue vs. Colon Metastasis) | 13 | 0 | 13.95 | |
| | | 18, 20 (Normal Colon Tissue vs. Colon Metastasis) | 12 | 0 | 10.26 | |
| 482 | 2783 | 15, 16 (Normal Colon vs. Colon Tumor Tissue) | 6 | 0 | 6.34 | |
| | | 03, 04 (Breast, High Met vs. Breast, Non-Met) | 5 | 40 | | 8.2 |
| | | 01, 02 (Colon, High Met vs. Colon, Low Met) | 27 | 6 | 4.15 | |
| 483 | 642906 | 16, 17 (Colon Tumor Tissue vs. Colon Metastasis) | 7 | 0 | 7.11 | |
| 484 | 8332 | 03, 04 (Breast, High Met vs. Breast, Non-Met) | 6 | 0 | 5.85 | |
| 485 | 453470 | 15, 17 (Normal Colon Tissue vs. Colon Metastasis) | 12 | 1 | 12.88 | |
| | | 15, 16 (Normal Colon vs. Colon Tumor Tissue) | 12 | 1 | 12.68 | |
| 486 | 552277 | 15, 17 (Normal Colon Tissue vs. Colon Metastasis) | 0 | 8 | | 7.45 |
| 487 | 464029 | 16, 17 (Colon Tumor Tissue vs. Colon Metastasis) | 1 | 9 | | 8.86 |
| 489 | 649722 | 15, 17 (Normal Colon Tissue vs. Colon Metastasis) | 8 | 0 | 8.59 | |
| | | 16, 17 (Colon Tumor Tissue vs. Colon Metastasis) | 6 | 0 | 6.09 | |
| 490 | 612572 | 15, 16 (Normal Colon vs. Colon Tumor Tissue) | 6 | 0 | 6.34 | |
| 491 | 385980 | 16, 17 (Colon Tumor Tissue vs. Colon Metastasis) | 27 | 12 | 2.28 | |
| | | 15, 17 (Normal Colon Tissue vs. Colon Metastasis) | 2 | 12 | | 5.59 |
| | | 15, 16 (Normal Colon vs. Colon Tumor Tissue) | 2 | 27 | | 12.77 |
| 492 | 141185 | 15, 16 (Normal Colon vs. Colon Tumor Tissue) | 8 | 0 | 8.46 | |
| | | 15, 17 (Normal Colon Tissue vs. Colon Metastasis) | 8 | 0 | 8.59 | |
| 493 | 463824 | 15, 17 (Normal Colon Tissue vs. Colon Metastasis) | 6 | 0 | 6.44 | |
| | | 15, 16 (Normal Colon vs. Colon Tumor Tissue) | 6 | 0 | 6.34 | |
| 494 | 446139 | 15, 16 (Normal Colon vs. Colon Tumor Tissue) | 13 | 0 | 13.74 | |
| | | 15, 17 (Normal Colon Tissue vs. Colon Metastasis) | 13 | 0 | 13.95 | |
| | | 18, 19 (Normal Colon Tissue vs. Colon Tumor) | 12 | 0 | 13.71 | |
| | | 18, 20 (Normal Colon Tissue vs. Colon Metastasis) | 12 | 0 | 10.26 | |
| 495 | 725994 | 15, 16 (Normal Colon vs. Colon Tumor Tissue) | 0 | 6 | | 5.68 |
| | | 16, 17 (Colon Tumor Tissue vs. Colon Metastasis) | 6 | 0 | 6.09 | |
| 496 | 736679 | 16, 17 (Colon Tumor Tissue vs. Colon Metastasis) | 6 | 0 | 6.09 | |
| | | 15, 16 (Normal Colon vs. Colon Tumor Tissue) | 0 | 6 | | 5.68 |
| 497 | 551718 | 15, 17 (Normal Colon Tissue vs. Colon Metastasis) | 0 | 8 | | 7.45 |
| 498 | 640525 | 15, 16 (Normal Colon vs. Colon Tumor Tissue) | 7 | 0 | 7.4 | |
| | | 15, 17 (Normal Colon Tissue vs. Colon Metastasis) | 7 | 0 | 7.51 | |
| 499 | 645210 | 15, 16 (Normal Colon vs. Colon Tumor Tissue) | 10 | 1 | 10.57 | |
| | | 15, 17 (Normal Colon Tissue vs. Colon Metastasis) | 10 | 0 | 10.73 | |
| 500 | 6567 | 03, 04 (Breast, High Met vs. Breast, Non-Met) | 10 | 0 | 9.76 | |
| 501 | 646146 | 16, 17 (Colon Tumor Tissue vs. Colon Metastasis) | 6 | 0 | 6.09 | |
| | | 15, 17 (Normal Colon Tissue vs. Colon Metastasis) | 8 | 0 | 8.59 | |
| 502 | 4934 | 01, 02 (Colon, High Met vs. Colon, Low Met) | 1 | 9 | | 9.76 |
| 503 | 450791 | 15, 16 (Normal Colon vs. Colon Tumor Tissue) | 18 | 6 | 3.17 | |
| | | 15, 17 (Normal Colon Tissue vs. Colon Metastasis) | 18 | 3 | 6.44 | |
| 504 | 227936 | 15, 16 (Normal Colon vs. Colon Tumor Tissue) | 0 | 8 | | 7.57 |
| 505 | 9436 | 16, 17 (Colon Tumor Tissue vs. Colon Metastasis) | 4 | 15 | | 3.69 |
| 506 | 2557 | 01, 02 (Colon, High Met vs. Colon, Low Met) | 23 | 8 | 2.65 | |
| 507 | 11356 | 01, 02 (Colon, High Met vs. Colon, Low Met) | 0 | 6 | | 6.5 |
| 508 | 7571 | 01, 02 (Colon, High Met vs. Colon, Low Met) | 0 | 8 | | 8.67 |
| 509 | 558116 | 16, 17 (Colon Tumor Tissue vs. Colon Metastasis) | 0 | 6 | | 5.91 |
| 510 | 216574 | 18, 20 (Normal Colon Tissue vs. Colon Metastasis) | 15 | 2 | 6.41 | |
| | | 15, 17 (Normal Colon Tissue vs. Colon Metastasis) | 107 | 29 | 3.96 | |
| | | 15, 16 (Normal Colon vs. Colon Tumor Tissue) | 107 | 29 | 3.9 | |
| 511 | 455145 | 15, 17 (Normal Colon Tissue vs. Colon Metastasis) | 6 | 0 | 6.44 | |
| 512 | 649148 | 15, 17 (Normal Colon Tissue vs. Colon Metastasis) | 8 | 0 | 8.59 | |
| 513 | 648996 | 15, 17 (Normal Colon Tissue vs. Colon Metastasis) | 6 | 0 | 6.44 | |
| | | 15, 16 (Normal Colon vs. Colon Tumor Tissue) | 6 | 0 | 6.34 | |
| 514 | 304253 | 15, 16 (Normal Colon vs. Colon Tumor Tissue) | 0 | 6 | | 5.68 |
| 515 | 649717 | 16, 17 (Colon Tumor Tissue vs. Colon Metastasis) | 6 | 0 | 6.09 | |
| 516 | 5838 | 01, 02 (Colon, High Met vs. Colon, Low Met) | 1 | 9 | | 9.76 |
| 517 | 454050 | 15, 17 (Normal Colon Tissue vs. Colon Metastasis) | 8 | 1 | 8.59 | |
| 518 | 557903 | 15, 16 (Normal Colon vs. Colon Tumor Tissue) | 0 | 9 | | 8.51 |
| 519 | 1724 | 03, 04 (Breast, High Met vs. Breast, Non-Met) | 6 | 24 | | 4.1 |
| 520 | 734803 | 16, 17 (Colon Tumor Tissue vs. Colon Metastasis) | 6 | 0 | 6.09 | |
| | | 15, 16 (Normal Colon vs. Colon Tumor Tissue) | 0 | 6 | | 5.68 |
| 521 | 557948 | 16, 17 (Colon Tumor Tissue vs. Colon Metastasis) | 0 | 11 | | 10.83 |
| 522 | 5838 | 01, 02 (Colon, High Met vs. Colon, Low Met) | 1 | 9 | | 9.76 |
| 523 | 2334 | 15, 16 (Normal Colon vs. Colon Tumor Tissue) | 0 | 6 | | 5.68 |
| 524 | 450953 | 15, 17 (Normal Colon Tissue vs. Colon Metastasis) | 2 | 14 | | 6.52 |
| | | 16, 17 (Colon Tumor Tissue vs. Colon Metastasis) | 1 | 14 | | 13.79 |
| 525 | 4840 | 03, 04 (Breast, High Met vs. Breast, Non-Met) | 18 | 6 | 2.93 | |
| 526 | 728421 | 15, 16 (Normal Colon vs. Colon Tumor Tissue) | 0 | 6 | | 5.68 |
| | | 16, 17 (Colon Tumor Tissue vs. Colon Metastasis) | 6 | 0 | 6.09 | |
| 527 | 4747 | 01, 02 (Colon, High Met vs. Colon, Low Met) | 2 | 10 | | 5.42 |
| 528 | 648934 | 15, 16 (Normal Colon vs. Colon Tumor Tissue) | 8 | 0 | 8.46 | |
| | | 15, 17 (Normal Colon Tissue vs. Colon Metastasis) | 8 | 0 | 8.59 | |
| 529 | 1787 | 01, 02 (Colon, High Met vs. Colon, Low Met) | 17 | 36 | | 2.3 |
| 530 | 558098 | 15, 16 (Normal Colon vs. Colon Tumor Tissue) | 6 | 0 | 6.34 | |
| 531 | 1655 | 03, 04 (Breast, High Met vs. Breast, Non-Met) | 0 | 58 | | 59.45 |
| | | 21, 22 (Normal Prostate vs. Prostate Cancer) | 116 | 51 | 2.24 | |
| | | 01, 02 (Colon, High Met vs. Colon, Low Met) | 67 | 2 | 30.9 | |
| 532 | 158601 | 03, 04 (Breast, High Met vs. Breast, Non-Met) | 1 | 10 | | 10.25 |
| 533 | 185486 | 03, 04 (Breast, High Met vs. Breast, Non-Met) | 0 | 13 | | 13.32 |
| 534 | 7110 | 03, 04 (Breast, High Met vs. Breast, Non-Met) | 4 | 19 | | 4.87 |
| 535 | 2543 | 01, 02 (Colon, High Met vs. Colon, Low Met) | 23 | 7 | 3.03 | |
| 536 | 115762 | 21, 22 (Normal Prostate vs. Prostate Cancer) | 16 | 5 | 3.15 | |
| | | 15, 16 (Normal Colon vs. Colon Tumor Tissue) | 0 | 6 | | 5.68 |
| | | 15, 17 (Normal Colon Tissue vs. Colon Metastasis) | 0 | 7 | | 6.52 |
| 537 | 696 | 01, 02 (Colon, High Met vs. Colon, Low Met) | 24 | 87 | | 3.93 |
| | | 03, 04 (Breast, High Met vs. Breast, Non-Met) | 37 | 13 | 2.78 | |
| 538 | 1948 | 03, 04 (Breast, High Met vs. Breast, Non-Met) | 37 | 15 | 2.41 | |
| 539 | 696 | 01, 02 (Colon, High Met vs. Colon, Low Met) | 24 | 87 | | 3.93 |
| | | 03, 04 (Breast, High Met vs. Breast, Non-Met) | 37 | 13 | 2.78 | |
| 540 | 696 | 03, 04 (Breast, High Met vs. Breast, Non-Met) | 37 | 13 | 2.78 | |
| | | 01, 02 (Colon, High Met vs. Colon, Low Met) | 24 | 87 | | 3.93 |
| 541 | 380477 | 15, 17 (Normal Colon Tissue vs. Colon Metastasis) | 7 | 0 | 7.51 | |
| 542 | 638799 | 15, 17 (Normal Colon Tissue vs. Colon Metastasis) | 10 | 0 | 10.73 | |
| 543 | 551982 | 16, 17 (Colon Tumor Tissue vs. Colon Metastasis) | 0 | 6 | | 5.91 |
| 544 | 551982 | 16, 17 (Colon Tumor Tissue vs. Colon Metastasis) | 0 | 6 | | 5.91 |
| 545 | 521840 | 15, 16 (Normal Colon vs. Colon Tumor Tissue) | 6 | 0 | 6.34 | |
| 546 | 561180 | 15, 16 (Normal Colon vs. Colon Tumor Tissue) | 11 | 2 | 5.81 | |
| 547 | 556245 | 15, 16 (Normal Colon vs. Colon Tumor Tissue) | 0 | 6 | | 5.68 |
| 548 | 449792 | 19, 20 (Colon Tumor Tissue vs. Colon Metastasis) | 0 | 5 | | 6.68 |
| | | 15, 16 (Normal Colon vs. Colon Tumor Tissue) | 3 | 13 | | 4.1 |
| 549 | 549722 | 16, 17 (Colon Tumor Tissue vs. Colon Metastasis) | 0 | 6 | | 5.91 |
| 550 | 612572 | 15, 16 (Normal Colon vs. Colon Tumor Tissue) | 6 | 0 | 6.34 | |
| 551 | 551235 | 16, 17 (Colon Tumor Tissue vs. Colon Metastasis) | 0 | 7 | | 6.89 |
| 552 | 449701 | 16, 17 (Colon Tumor Tissue vs. Colon Metastasis) | 17 | 1 | 17.26 | |
| | | 15, 16 (Normal Colon vs. Colon Tumor Tissue) | 1 | 17 | | 16.08 |
| 553 | 375380 | 16, 17 (Colon Tumor Tissue vs. Colon Metastasis) | 0 | 9 | | 8.86 |
| | | 15, 17 (Normal Colon Tissue vs. Colon Metastasis) | 1 | 9 | | 8.38 |
| 554 | 56940 | 15, 16 (Normal Colon vs. Colon Tumor Tissue) | 0 | 6 | | 5.68 |
| | | 15, 17 (Normal Colon Tissue vs. Colon Metastasis) | 0 | 8 | | 7.45 |
| 555 | 549160 | 15, 17 (Normal Colon Tissue vs. Colon Metastasis) | 0 | 7 | | 6.52 |
| 556 | 554151 | 15, 17 (Normal Colon Tissue vs. Colon Metastasis) | 1 | 15 | | 13.97 |
| | | 15, 16 (Normal Colon vs. Colon Tumor Tissue) | 1 | 9 | | 8.51 |
| 557 | 727331 | 16, 17 (Colon Tumor Tissue vs. Colon Metastasis) | 6 | 0 | 6.09 | |
| | | 15, 16 (Normal Colon vs. Colon Tumor Tissue) | 0 | 6 | | 5.68 |
| 558 | 551502 | 15, 16 (Normal Colon vs. Colon Tumor Tissue) | 22 | 7 | 3.32 | |
| | | 16, 17 (Colon Tumor Tissue vs. Colon Metastasis) | 7 | 19 | | 2.67 |
| 559 | 612572 | 15, 16 (Normal Colon vs. Colon Tumor Tissue) | 6 | 0 | 6.34 | |
| 560 | 701221 | 16, 17 (Colon Tumor Tissue vs. Colon Metastasis) | 7 | 0 | 7.11 | |
| 561 | 378041 | 16, 17 (Colon Tumor Tissue vs. Colon Metastasis) | 13 | 4 | 3.3 | |
| | | 15, 16 (Normal Colon vs. Colon Tumor Tissue) | 0 | 13 | | 12.3 |
| 562 | 503491 | 16, 17 (Colon Tumor Tissue vs. Colon Metastasis) | 6 | 0 | 6.09 | |
| 563 | 452833 | 15, 17 (Normal Colon Tissue vs. Colon Metastasis) | 0 | 7 | | 6.52 |
| 564 | 640974 | 15, 17 (Normal Colon Tissue vs. Colon Metastasis) | 9 | 0 | 9.66 | |
| 565 | 735326 | 15, 16 (Normal Colon vs. Colon Tumor Tissue) | 0 | 7 | | 6.62 |
| | | 16, 17 (Colon Tumor Tissue vs. Colon Metastasis) | 7 | 0 | 7.11 | |
| 566 | 555944 | 16, 17 (Colon Tumor Tissue vs. Colon Metastasis) | 0 | 6 | | 5.91 |
| 567 | 447532 | 15, 16 (Normal Colon vs. Colon Tumor Tissue) | 11 | 0 | 11.63 | |
| | | 15, 17 (Normal Colon Tissue vs. Colon Metastasis) | 11 | 1 | 11.81 | |
| 568 | 455598 | 16, 17 (Colon Tumor Tissue vs. Colon Metastasis) | 0 | 6 | | 5.91 |
| 569 | 555734 | 15, 17 (Normal Colon Tissue vs. Colon Metastasis) | 0 | 10 | | 9.32 |
| | | 16, 17 (Colon Tumor Tissue vs. Colon Metastasis) | 0 | 10 | | 9.85 |
| 570 | 446663 | 16, 17 (Colon Tumor Tissue vs. Colon Metastasis) | 6 | 32 | | 5.25 |
| | | 18, 20 (Normal Colon Tissue vs. Colon Metastasis) | 1 | 8 | | 9.36 |
| | | 19, 20 (Colon Tumor Tissue vs. Colon Metastasis) | 0 | 8 | | 10.7 |
| | | 15, 17 (Normal Colon Tissue vs. Colon Metastasis) | 14 | 32 | | 2.13 |
| 571 | 449862 | 15, 17 (Normal Colon Tissue vs. Colon Metastasis) | 0 | 7 | | 6.52 |
| 572 | 549591 | 16, 17 (Colon Tumor Tissue vs. Colon Metastasis) | 7 | 24 | | 3.38 |
| | | 15, 17 (Normal Colon Tissue vs. Colon Metastasis) | 2 | 24 | | 11.18 |
| 573 | 553877 | 16, 17 (Colon Tumor Tissue vs. Colon Metastasis) | 1 | 8 | | 7.88 |
| 574 | 553501 | 15, 16 (Normal Colon vs. Colon Tumor Tissue) | 14 | 1 | 14.8 | |
| | | 15, 17 (Normal Colon Tissue vs. Colon Metastasis) | 14 | 3 | 5.01 | |
| 575 | 1905 | 01, 02 (Colon, High Met vs. Colon, Low Met) | 7 | 21 | | 3.25 |
| | | 15, 17 (Normal Colon Tissue vs. Colon Metastasis) | 0 | 7 | | 6.52 |
| 576 | 446599 | 15, 16 (Normal Colon vs. Colon Tumor Tissue) | 13 | 2 | 6.87 | |
| 577 | 559409 | 16, 17 (Colon Tumor Tissue vs. Colon Metastasis) | 0 | 6 | | 5.91 |
| 578 | 551982 | 16, 17 (Colon Tumor Tissue vs. Colon Metastasis) | 0 | 6 | | 5.91 |
| 579 | 559057 | 15, 17 (Normal Colon Tissue vs. Colon Metastasis) | 0 | 7 | | 6.52 |
| 580 | 446760 | 16, 17 (Colon Tumor Tissue vs. Colon Metastasis) | 22 | 7 | 3.19 | |
| 581 | 551502 | 16, 17 (Colon Tumor Tissue vs. Colon Metastasis) | 7 | 19 | | 2.67 |
| | | 15, 16 (Normal Colon vs. Colon Tumor Tissue) | 22 | 7 | 3.32 | |
| 582 | 446531 | 16, 17 (Colon Tumor Tissue vs. Colon Metastasis) | 0 | 6 | | 5.91 |
| 583 | 506744 | 15, 16 (Normal Colon vs. Colon Tumor Tissue) | 7 | 0 | 7.4 | |
| | | 16, 17 (Colon Tumor Tissue vs. Colon Metastasis) | 0 | 8 | | 7.88 |
| 584 | 401849 | 15, 16 (Normal Colon vs. Colon Tumor Tissue) | 7 | 0 | 7.4 | |
| | | 16, 17 (Colon Tumor Tissue vs. Colon Metastasis) | 0 | 15 | | 14.77 |
| 585 | 453848 | 15, 16 (Normal Colon vs. Colon Tumor Tissue) | 2 | 14 | | 6.62 |
| 586 | 456764 | 16, 17 (Colon Tumor Tissue vs. Colon Metastasis) | 10 | 1 | 10.16 | |
| | | 15, 17 (Normal Colon Tissue vs. Colon Metastasis) | 14 | 1 | 15.03 | |
| 587 | 446371 | 15, 16 (Normal Colon vs. Colon Tumor Tissue) | 6 | 0 | 6.34 | |
| 588 | 406413 | 16, 17 (Colon Tumor Tissue vs. Colon Metastasis) | 1 | 9 | | 8.86 |
| 589 | 555103 | 15, 17 (Normal Colon Tissue vs. Colon Metastasis) | 0 | 7 | | 6.52 |
| | | 23, 24 (Normal Lung Tissue vs. Lung Tumor Tissue) | 0 | 6 | | 5.94 |
| 590 | 735292 | 15, 16 (Normal Colon vs. Colon Tumor Tissue) | 0 | 9 | | 8.51 |
| | | 16, 17 (Colon Tumor Tissue vs. Colon Metastasis) | 9 | 0 | 9.14 | |
| 591 | 558534 | 16, 17 (Colon Tumor Tissue vs. Colon Metastasis) | 0 | 7 | | 6.89 |
| 592 | 727181 | 16, 17 (Colon Tumor Tissue vs. Colon Metastasis) | 6 | 0 | 6.09 | |
| | | 15, 16 (Normal Colon vs. Colon Tumor Tissue) | 0 | 6 | | 5.68 |
| 593 | 551117 | 16, 17 (Colon Tumor Tissue vs. Colon Metastasis) | 0 | 6 | | 5.91 |
| 594 | 464040 | 15, 16 (Normal Colon vs. Colon Tumor Tissue) | 6 | 0 | 6.34 | |
| 595 | 446371 | 15, 16 (Normal Colon vs. Colon Tumor Tissue) | 6 | 0 | 6.34 | |
| 596 | 728408 | 16, 17 (Colon Tumor Tissue vs. Colon Metastasis) | 12 | 0 | 12.19 | |
| | | 15, 16 (Normal Colon vs. Colon Tumor Tissue) | 0 | 12 | | 11.35 |
| 597 | 649259 | 15, 17 (Normal Colon Tissue vs. Colon Metastasis) | 7 | 0 | 7.51 | |
| | | 15, 16 (Normal Colon vs. Colon Tumor Tissue) | 7 | 0 | 7.4 | |
| 598 | 15414 | 15, 17 (Normal Colon Tissue vs. Colon Metastasis) | 1 | 9 | | 8.38 |
| 599 | 639240 | 15, 17 (Normal Colon Tissue vs. Colon Metastasis) | 9 | 0 | 9.66 | |
| | | 15, 16 (Normal Colon vs. Colon Tumor Tissue) | 9 | 0 | 9.51 | |
| 600 | 549722 | 16, 17 (Colon Tumor Tissue vs. Colon Metastasis) | 0 | 6 | | 5.91 |
| 601 | 561499 | 16, 17 (Colon Tumor Tissue vs. Colon Metastasis) | 1 | 8 | | 7.88 |
| | | 15, 16 (Normal Colon vs. Colon Tumor Tissue) | 8 | 1 | 8.46 | |
| 602 | 639029 | 15, 17 (Normal Colon Tissue vs. Colon Metastasis) | 6 | 0 | 6.44 | |
| 603 | 449512 | 15, 17 (Normal Colon Tissue vs. Colon Metastasis) | 4 | 14 | | 3.26 |
| | | 16, 17 (Colon Tumor Tissue vs. Colon Metastasis) | 1 | 14 | | 13.79 |
| 604 | 446987 | 15, 17 (Normal Colon Tissue vs. Colon Metastasis) | 10 | 0 | 10.73 | |
| 605 | 466302 | 15, 16 (Normal Colon vs. Colon Tumor Tissue) | 9 | 1 | 9.51 | |
| 606 | 553802 | 15, 17 (Normal Colon Tissue vs. Colon Metastasis) | 1 | 9 | | 8.38 |
| 607 | 639662 | 15, 17 (Normal Colon Tissue vs. Colon Metastasis) | 7 | 0 | 7.51 | |
| | | 15, 16 (Normal Colon vs. Colon Tumor Tissue) | 7 | 0 | 7.4 | |
| 608 | 551527 | 15, 17 (Normal Colon Tissue vs. Colon Metastasis) | 0 | 7 | | 6.52 |
| 609 | 730389 | 16, 17 (Colon Tumor Tissue vs. Colon Metastasis) | 9 | 0 | 9.14 | |
| | | 15, 16 (Normal Colon vs. Colon Tumor Tissue) | 0 | 9 | | 8.51 |
| 610 | 640974 | 15, 17 (Normal Colon Tissue vs. Colon Metastasis) | 9 | 0 | 9.66 | |
| 611 | 417155 | 15, 16 (Normal Colon vs. Colon Tumor Tissue) | 6 | 0 | 6.34 | |
| 612 | 417155 | 15, 16 (Normal Colon vs. Colon Tumor Tissue) | 6 | 0 | 6.34 | |
| 613 | 451784 | 16, 17 (Colon Tumor Tissue vs. Colon Metastasis) | 0 | 7 | | 6.89 |
| 614 | 649152 | 15, 17 (Normal Colon Tissue vs. Colon Metastasis) | 6 | 0 | 6.44 | |
| 615 | 450867 | 15, 16 (Normal Colon vs. Colon Tumor Tissue) | 7 | 0 | 7.4 | |
| 616 | 143436 | 15, 17 (Normal Colon Tissue vs. Colon Metastasis) | 21 | 9 | 2.5 | |
| 617 | 549395 | 16, 17 (Colon Tumor Tissue vs. Colon Metastasis) | 1 | 13 | | 12.8 |
| | | 15, 17 (Normal Colon Tissue vs. Colon Metastasis) | 2 | 13 | | 6.06 |
| 618 | 639273 | 15, 16 (Normal Colon vs. Colon Tumor Tissue) | 9 | 0 | 9.51 | |
| | | 15, 17 (Normal Colon Tissue vs. Colon Metastasis) | 9 | 0 | 9.66 | |
| 619 | 506744 | 15, 16 (Normal Colon vs. Colon Tumor Tissue) | 7 | 0 | 7.4 | |
| | | 16, 17 (Colon Tumor Tissue vs. Colon Metastasis) | 0 | 8 | | 7.88 |
| 620 | 736595 | 16, 17 (Colon Tumor Tissue vs. Colon Metastasis) | 6 | 0 | 6.09 | |
| | | 15, 16 (Normal Colon vs. Colon Tumor Tissue) | 0 | 6 | | 5.68 |
| 621 | 230995 | 15, 16 (Normal Colon vs. Colon Tumor Tissue) | 0 | 7 | | 6.62 |
| 622 | 451784 | 16, 17 (Colon Tumor Tissue vs. Colon Metastasis) | 0 | 7 | | 6.89 |
| 623 | 226324 | 16, 17 (Colon Tumor Tissue vs. Colon Metastasis) | 0 | 6 | | 5.91 |
| 624 | 449617 | 16, 17 (Colon Tumor Tissue vs. Colon Metastasis) | 7 | 18 | | 2.53 |
| 625 | 451092 | 16, 17 (Colon Tumor Tissue vs. Colon Metastasis) | 1 | 9 | | 8.86 |
| 626 | 546642 | 16, 17 (Colon Tumor Tissue vs. Colon Metastasis) | 11 | 0 | 11.17 | |
| 627 | 553736 | 16, 17 (Colon Tumor Tissue vs. Colon Metastasis) | 2 | 10 | | 4.92 |
| 628 | 394413 | 15, 16 (Normal Colon vs. Colon Tumor Tissue) | 113 | 3 | 39.81 | |
| | | 18, 20 (Normal Colon Tissue vs. Colon Metastasis) | 21 | 0 | 17.95 | |
| | | 18, 19 (Normal Colon Tissue vs. Colon Tumor) | 21 | 2 | 12 | |
| | | 15, 17 (Normal Colon Tissue vs. Colon Metastasis) | 113 | 0 | 121.29 | |
| 629 | 556326 | 16, 17 (Colon Tumor Tissue vs. Colon Metastasis) | 0 | 8 | | 7.88 |
| 630 | 448606 | 15, 17 (Normal Colon Tissue vs. Colon Metastasis) | 3 | 20 | | 6.21 |
| 631 | 394413 | 15, 17 (Normal Colon Tissue vs. Colon Metastasis) | 113 | 0 | 121.29 | |
| | | 18, 19 (Normal Colon Tissue vs. Colon Tumor) | 21 | 2 | 12 | |
| | | 15, 16 (Normal Colon vs. Colon Tumor Tissue) | 113 | 3 | 39.81 | |
| | | 18, 20 (Normal Colon Tissue vs. Colon Metastasis) | 21 | 0 | 17.95 | |
| 632 | 645633 | 15, 17 (Normal Colon Tissue vs. Colon Metastasis) | 7 | 0 | 7.51 | |
| 633 | 551634 | 16, 17 (Colon Tumor Tissue vs. Colon Metastasis) | 0 | 6 | | 5.91 |
| 634 | 556326 | 16, 17 (Colon Tumor Tissue vs. Colon Metastasis) | 0 | 8 | | 7.88 |
| 635 | 540787 | 15, 16 (Normal Colon vs. Colon Tumor Tissue) | 7 | 0 | 7.4 | |
| | | 15, 17 (Normal Colon Tissue vs. Colon Metastasis) | 7 | 0 | 7.51 | |
| 636 | 648872 | 15, 16 (Normal Colon vs. Colon Tumor Tissue) | 6 | 0 | 6.34 | |
| | | 15, 17 (Normal Colon Tissue vs. Colon Metastasis) | 6 | 0 | 6.44 | |
| 637 | 643804 | 15, 16 (Normal Colon vs. Colon Tumor Tissue) | 6 | 0 | 6.34 | |
| | | 15, 17 (Normal Colon Tissue vs. Colon Metastasis) | 6 | 0 | 6.44 | |
| 638 | 446139 | 15, 17 (Normal Colon Tissue vs. Colon Metastasis) | 13 | 0 | 13.95 | |
| | | 18, 19 (Normal Colon Tissue vs. Colon Tumor) | 12 | 0 | 13.71 | |
| | | 18, 20 (Normal Colon Tissue vs. Colon Metastasis) | 12 | 0 | 10.26 | |
| | | 15, 16 (Normal Colon vs. Colon Tumor Tissue) | 13 | 0 | 13.74 | |
| 639 | 640356 | 15, 17 (Normal Colon Tissue vs. Colon Metastasis) | 10 | 0 | 10.73 | |
| 640 | 379186 | 16, 17 (Colon Tumor Tissue vs. Colon Metastasis) | 6 | 0 | 6.09 | |
| 641 | 454927 | 16, 17 (Colon Tumor Tissue vs. Colon Metastasis) | 3 | 14 | | 4.6 |
| 642 | 401849 | 16, 17 (Colon Tumor Tissue vs. Colon Metastasis) | 0 | 15 | | 14.77 |
| | | 15, 16 (Normal Colon vs. Colon Tumor Tissue) | 7 | 0 | 7.4 | |
| 643 | 452414 | 15, 16 (Normal Colon vs. Colon Tumor Tissue) | 17 | 0 | 17.97 | |
| | | 15, 17 (Normal Colon Tissue vs. Colon Metastasis) | 17 | 0 | 18.25 | |
| 644 | 446789 | 15, 16 (Normal Colon vs. Colon Tumor Tissue) | 16 | 5 | 3.38 | |
| 645 | 189561 | 15, 16 (Normal Colon vs. Colon Tumor Tissue) | 0 | 9 | | 8.51 |
| | | 08, 09 (Lung, High Met vs. Lung, Low Met) | 1 | 14 | | 10.02 |
| | | 15, 17 (Normal Colon Tissue vs. Colon Metastasis) | 0 | 9 | | 8.38 |
| 646 | 640323 | 15, 17 (Normal Colon Tissue vs. Colon Metastasis) | 8 | 0 | 8.59 | |
| | | 16, 17 (Colon Tumor Tissue vs. Colon Metastasis) | 6 | 0 | 6.09 | |
| 647 | 558116 | 16, 17 (Colon Tumor Tissue vs. Colon Metastasis) | 0 | 6 | | 5.91 |
| 648 | 468109 | 15, 17 (Normal Colon Tissue vs. Colon Metastasis) | 6 | 0 | 6.44 | |
| 649 | 481441 | 16, 17 (Colon Tumor Tissue vs. Colon Metastasis) | 12 | 0 | 12.19 | |
| 650 | 449956 | 16, 17 (Colon Tumor Tissue vs. Colon Metastasis) | 10 | 1 | 10.16 | |
| 651 | 727224 | 16, 17 (Colon Tumor Tissue vs. Colon Metastasis) | 8 | 0 | 8.12 | |
| | | 15, 16 (Normal Colon vs. Colon Tumor Tissue) | 0 | 8 | | 7.57 |
| 652 | 551907 | 15, 16 (Normal Colon vs. Colon Tumor Tissue) | 7 | 0 | 7.4 | |
| 653 | 447532 | 15, 16 (Normal Colon vs. Colon Tumor Tissue) | 11 | 0 | 11.63 | |
| | | 15, 17 (Normal Colon Tissue vs. Colon Metastasis) | 11 | 1 | 11.81 | |
| 654 | 447532 | 15, 17 (Normal Colon Tissue vs. Colon Metastasis) | 11 | 1 | 11.81 | |
| | | 15, 16 (Normal Colon vs. Colon Tumor Tissue) | 11 | 0 | 11.63 | |
| 655 | 558454 | 15, 17 (Normal Colon Tissue vs. Colon Metastasis) | 0 | 7 | | 6.52 |
| 656 | 502683 | 15, 16 (Normal Colon vs. Colon Tumor Tissue) | 6 | 0 | 6.34 | |
| 657 | 446909 | 16, 17 (Colon Tumor Tissue vs. Colon Metastasis) | 2 | 12 | | 5.91 |
| 658 | 452506 | 15, 16 (Normal Colon vs. Colon Tumor Tissue) | 7 | 0 | 7.4 | |
| | | 16, 17 (Colon Tumor Tissue vs. Colon Metastasis) | 0 | 6 | | 5.91 |
| 659 | 449792 | 19, 20 (Colon Tumor Tissue vs. Colon Metastasis) | 0 | 5 | | 6.68 |
| | | 15, 16 (Normal Colon vs. Colon Tumor Tissue) | 3 | 13 | | 4.1 |
| 660 | 549395 | 15, 17 (Normal Colon Tissue vs. Colon Metastasis) | 2 | 13 | | 6.06 |
| | | 16, 17 (Colon Tumor Tissue vs. Colon Metastasis) | 1 | 13 | | 12.8 |
| 661 | 234653 | 16, 17 (Colon Tumor Tissue vs. Colon Metastasis) | 6 | 18 | | 2.95 |
| 662 | 453911 | 15, 16 (Normal Colon vs. Colon Tumor Tissue) | 0 | 6 | | 5.68 |
| 663 | 452071 | 18, 20 (Normal Colon Tissue vs. Colon Metastasis) | 14 | 0 | 11.97 | |
| | | 15, 16 (Normal Colon vs. Colon Tumor Tissue) | 109 | 1 | 115.21 | |
| | | 15, 17 (Normal Colon Tissue vs. Colon Metastasis) | 109 | 0 | 117 | |
| | | 18, 19 (Normal Colon Tissue vs. Colon Tumor) | 14 | 0 | 16 | |
| 664 | 451032 | 15, 16 (Normal Colon vs. Colon Tumor Tissue) | 6 | 0 | 6.34 | |
| 665 | 446680 | 15, 17 (Normal Colon Tissue vs. Colon Metastasis) | 29 | 84 | | 2.7 |
| | | 23, 24 (Normal Lung Tissue vs. Lung Tumor Tissue) | 40 | 94 | | 2.33 |
| 666 | 641884 | 16, 17 (Colon Tumor Tissue vs. Colon Metastasis) | 7 | 0 | 7.11 | |
| | | 15, 17 (Normal Colon Tissue vs. Colon Metastasis) | 8 | 0 | 8.59 | |
| 667 | 452800 | 15, 17 (Normal Colon Tissue vs. Colon Metastasis) | 3 | 13 | | 4.04 |
| 668 | 461835 | 15, 16 (Normal Colon vs. Colon Tumor Tissue) | 7 | 0 | 7.4 | |
| 669 | 548965 | 16, 17 (Colon Tumor Tissue vs. Colon Metastasis) | 4 | 14 | | 3.45 |
| 670 | 734793 | 15, 16 (Normal Colon vs. Colon Tumor Tissue) | 0 | 9 | | 8.51 |
| | | 16, 17 (Colon Tumor Tissue vs. Colon Metastasis) | 9 | 0 | 9.14 | |
| 671 | 539955 | 23, 24 (Normal Lung Tissue vs. Lung Tumor Tissue) | 3 | 47 | | 15.51 |
| | | 16, 17 (Colon Tumor Tissue vs. Colon Metastasis) | 24 | 0 | 24.37 | |
| | | 15, 17 (Normal Colon Tissue vs. Colon Metastasis) | 11 | 0 | 11.81 | |
| 672 | 561892 | 15, 17 (Normal Colon Tissue vs. Colon Metastasis) | 0 | 7 | | 6.52 |
| 673 | 562292 | 16, 17 (Colon Tumor Tissue vs. Colon Metastasis) | 0 | 6 | | 5.91 |
| 674 | 420686 | 16, 17 (Colon Tumor Tissue vs. Colon Metastasis) | 0 | 8 | | 7.88 |
| 675 | 9436 | 16, 17 (Colon Tumor Tissue vs. Colon Metastasis) | 4 | 15 | | 3.69 |
| 676 | 1013 | 01, 02 (Colon, High Met vs. Colon, Low Met) | 40 | 84 | | 2.28 |
| | | 15, 16 (Normal Colon vs. Colon Tumor Tissue) | 6 | 0 | 6.34 | |
| | | 15, 17 (Normal Colon Tissue vs. Colon Metastasis) | 6 | 0 | 6.44 | |
| 677 | 412364 | 15, 17 (Normal Colon Tissue vs. Colon Metastasis) | 6 | 0 | 6.44 | |
| | | 15, 16 (Normal Colon vs. Colon Tumor Tissue) | 6 | 0 | 6.34 | |
| 678 | 44424 | 08, 09 (Lung, High Met vs. Lung, Low Met) | 4 | 40 | | 7.16 |
| | | 15, 17 (Normal Colon Tissue vs. Colon Metastasis) | 25 | 90 | | 3.35 |
| | | 16, 17 (Colon Tumor Tissue vs. Colon Metastasis) | 41 | 90 | | 2.16 |
| 679 | 394413 | 15, 17 (Normal Colon Tissue vs. Colon Metastasis) | 113 | 0 | 121.29 | |
| | | 18, 19 (Normal Colon Tissue vs. Colon Tumor) | 21 | 2 | 12 | |
| | | 15, 16 (Normal Colon vs. Colon Tumor Tissue) | 113 | 3 | 39.81 | |
| | | 18, 20 (Normal Colon Tissue vs. Colon Metastasis) | 21 | 0 | 17.95 | |
| 680 | 449617 | 16, 17 (Colon Tumor Tissue vs. Colon Metastasis) | 7 | 18 | | 2.53 |
| 681 | 455032 | 15, 16 (Normal Colon vs. Colon Tumor Tissue) | 0 | 6 | | 5.68 |
| 682 | 185400 | 03, 04 (Breast, High Met vs. Breast, Non-Met) | 1 | 62 | | 63.55 |
| | | 16, 17 (Colon Tumor Tissue vs. Colon Metastasis) | 1 | 9 | | 8.86 |
| 683 | 453911 | 15, 16 (Normal Colon vs. Colon Tumor Tissue) | 0 | 6 | | 5.68 |
| 684 | 650297 | 15, 17 (Normal Colon Tissue vs. Colon Metastasis) | 6 | 0 | 6.44 | |
| 685 | 185400 | 03, 04 (Breast, High Met vs. Breast, Non-Met) | 1 | 62 | | 63.55 |
| | | 16, 17 (Colon Tumor Tissue vs. Colon Metastasis) | 1 | 9 | | 8.86 |
| 686 | 449512 | 15, 17 (Normal Colon Tissue vs. Colon Metastasis) | 4 | 14 | | 3.26 |
| | | 16, 17 (Colon Tumor Tissue vs. Colon Metastasis) | 1 | 14 | | 13.79 |
| 687 | 44424 | 16, 17 (Colon Tumor Tissue vs. Colon Metastasis) | 41 | 90 | | 2.16 |
| | | 15, 17 (Normal Colon Tissue vs. Colon Metastasis) | 25 | 90 | | 3.35 |
| | | 08, 09 (Lung, High Met vs. Lung, Low Met) | 4 | 40 | | 7.16 |
| 688 | 556216 | 16, 17 (Colon Tumor Tissue vs. Colon Metastasis) | 0 | 7 | | 6.89 |
| | | 15, 17 (Normal Colon Tissue vs. Colon Metastasis) | 0 | 7 | | 6.52 |
| 689 | 448677 | 15, 16 (Normal Colon vs. Colon Tumor Tissue) | 11 | 1 | 11.63 | |
| 690 | 375380 | 15, 17 (Normal Colon Tissue vs. Colon Metastasis) | 1 | 9 | | 8.38 |
| | | 16, 17 (Colon Tumor Tissue vs. Colon Metastasis) | 0 | 9 | | 8.86 |
| 691 | 379341 | 15, 17 (Normal Colon Tissue vs. Colon Metastasis) | 3 | 14 | | 4.35 |
| | | 08, 09 (Lung, High Met vs. Lung, Low Met) | 2 | 21 | | 7.51 |
| 692 | 376988 | 16, 17 (Colon Tumor Tissue vs. Colon Metastasis) | 1 | 8 | | 7.88 |
| 693 | 559806 | 16, 17 (Colon Tumor Tissue vs. Colon Metastasis) | 0 | 6 | | 5.91 |
| 694 | 550195 | 16, 17 (Colon Tumor Tissue vs. Colon Metastasis) | 0 | 11 | | 10.83 |
| | | 15, 17 (Normal Colon Tissue vs. Colon Metastasis) | 2 | 11 | | 5.12 |
| 695 | 562221 | 15, 16 (Normal Colon vs. Colon Tumor Tissue) | 8 | 0 | 8.46 | |
| 696 | 211 | 01, 02 (Colon, High Met vs. Colon, Low Met) | 109 | 206 | | 2.05 |
| | | 03, 04 (Breast, High Met vs. Breast, Non-Met) | 121 | 43 | 2.75 | |
| 697 | 6751 | 03, 04 (Breast, High Met vs. Breast, Non-Met) | 0 | 11 | | 11.27 |
| | | 08, 09 (Lung, High Met vs. Lung, Low Met) | 5 | 0 | 6.99 | |
| 698 | 6751 | 08, 09 (Lung, High Met vs. Lung, Low Met) | 5 | 0 | 6.99 | |
| | | 03, 04 (Breast, High Met vs. Breast, Non-Met) | 0 | 11 | | 11.27 |
| 700 | 2883 | 03, 04 (Breast, High Met vs. Breast, Non-Met) | 9 | 21 | | 2.39 |
| 701 | 9784 | 03, 04 (Breast, High Met vs. Breast, Non-Met) | 0 | 6 | | 6.15 |
| 702 | 649722 | 15, 17 (Normal Colon Tissue vs. Colon Metastasis) | 8 | 0 | 8.59 | |
| | | 16, 17 (Colon Tumor Tissue vs. Colon Metastasis) | 6 | 0 | 6.09 | |
| 704 | 10340 | 03, 04 (Breast, High Met vs. Breast, Non-Met) | 6 | 0 | 5.85 | |
| 705 | 1649 | 03, 04 (Breast, High Met vs. Breast, Non-Met) | 15 | 1 | 14.63 | |
| 706 | 4325 | 03, 04 (Breast, High Met vs. Breast, Non-Met) | 7 | 0 | 6.83 | |
| 707 | 10882 | 03, 04 (Breast, High Met vs. Breast, Non-Met) | 6 | 20 | | 3.42 |
| 708 | 10342 | 03, 04 (Breast, High Met vs. Breast, Non-Met) | 7 | 0 | 6.83 | |
| 709 | 6474 | 01, 02 (Colon, High Met vs. Colon, Low Met) | 0 | 6 | | 6.5 |
| 710 | 10340 | 03, 04 (Breast, High Met vs. Breast, Non-Met) | 6 | 0 | 5.85 | |
| 711 | 734723 | 16, 17 (Colon Tumor Tissue vs. Colon Metastasis) | 9 | 0 | 9.14 | |
| | | 15, 16 (Normal Colon vs. Colon Tumor Tissue) | 0 | 9 | | 8.51 |
| 712 | 452142 | 15, 16 (Normal Colon vs. Colon Tumor Tissue) | 1 | 10 | | 9.46 |
| | | 16, 17 (Colon Tumor Tissue vs. Colon Metastasis) | 10 | 2 | 5.08 | |
| 713 | 185432 | 03, 04 (Breast, High Met vs. Breast, Non-Met) | 0 | 26 | | 26.65 |
| 714 | 11456 | 01, 02 (Colon, High Met vs. Colon, Low Met) | 0 | 6 | | 6.5 |
| 715 | 508892 | 15, 17 (Normal Colon Tissue vs. Colon Metastasis) | 1 | 10 | | 9.32 |
| | | 16, 17 (Colon Tumor Tissue vs. Colon Metastasis) | 2 | 10 | | 4.92 |
| 716 | 67 | 03, 04 (Breast, High Met vs. Breast, Non-Met) | 23 | 0 | 22.44 | |
| | | 01, 02 (Colon, High Met vs. Colon, Low Met) | 0 | 32 | | 34.69 |
| 717 | 2636 | 08, 09 (Lung, High Met vs. Lung, Low Met) | 7 | 1 | 9.78 | |
| | | 01, 02 (Colon, High Met vs. Colon, Low Met) | 8 | 19 | | 2.57 |
| 718 | 735028 | 15, 16 (Normal Colon vs. Colon Tumor Tissue) | 0 | 6 | | 5.68 |
| | | 16, 17 (Colon Tumor Tissue vs. Colon Metastasis) | 6 | 0 | 6.09 | |
| 719 | 1924 | 01, 02 (Colon, High Met vs. Colon, Low Met) | 8 | 21 | | 2.85 |
| 720 | 640116 | 15, 16 (Normal Colon vs. Colon Tumor Tissue) | 19 | 4 | 5.02 | |
| | | 15, 17 (Normal Colon Tissue vs. Colon Metastasis) | 19 | 0 | 20.39 | |
| 721 | 6546 | 01, 02 (Colon, High Met vs. Colon, Low Met) | 0 | 9 | | 9.76 |
| 722 | 730866 | 16, 17 (Colon Tumor Tissue vs. Colon Metastasis) | 8 | 0 | 8.12 | |
| | | 15, 16 (Normal Colon vs. Colon Tumor Tissue) | 0 | 8 | | 7.57 |
| 723 | 4829 | 01, 02 (Colon, High Met vs. Colon, Low Met) | 0 | 7 | | 7.59 |
| 724 | 546632 | 23, 24 (Normal Lung Tissue vs. Lung Tumor Tissue) | 3 | 34 | | 11.22 |
| | | 16, 17 (Colon Tumor Tissue vs. Colon Metastasis) | 15 | 0 | 15.23 | |
| 725 | 549934 | 15, 16 (Normal Colon vs. Colon Tumor Tissue) | 11 | 3 | 3.88 | |
| | | 16, 17 (Colon Tumor Tissue vs. Colon Metastasis) | 3 | 20 | | 6.56 |
| | | 21, 22 (Normal Prostate vs. Prostate Cancer) | 8 | 0 | 7.87 | |
| 726 | 649655 | 16, 17 (Colon Tumor Tissue vs. Colon Metastasis) | 12 | 0 | 12.19 | |
| | | 15, 17 (Normal Colon Tissue vs. Colon Metastasis) | 6 | 0 | 6.44 | |
| 727 | 62016 | 16, 17 (Colon Tumor Tissue vs. Colon Metastasis) | 0 | 6 | | 5.91 |
| 728 | 2783 | 01, 02 (Colon, High Met vs. Colon, Low Met) | 27 | 6 | 4.15 | |
| | | 03, 04 (Breast, High Met vs. Breast, Non-Met) | 5 | 40 | | 8.2 |
| | | 15, 16 (Normal Colon vs. Colon Tumor Tissue) | 6 | 0 | 6.34 | |
| 729 | 3876 | 21, 22 (Normal Prostate vs. Prostate Cancer) | 9 | 26 | | 2.94 |
| | | 15, 17 (Normal Colon Tissue vs. Colon Metastasis) | 3 | 14 | | 4.35 |
| 730 | 20036 | 15, 17 (Normal Colon Tissue vs. Colon Metastasis) | 1 | 13 | | 12.11 |
| 731 | 644032 | 16, 17 (Colon Tumor Tissue vs. Colon Metastasis) | 124 | 0 | 125.92 | |
| | | 15, 16 (Normal Colon vs. Colon Tumor Tissue) | 7 | 124 | | 16.76 |
| | | 15, 17 (Normal Colon Tissue vs. Colon Metastasis) | 7 | 0 | 7.51 | |
| 732 | 451636 | 16, 17 (Colon Tumor Tissue vs. Colon Metastasis) | 1 | 8 | | 7.88 |
| 733 | 3428 | 03, 04 (Breast, High Met vs. Breast, Non-Met) | 20 | 0 | 19.51 | |
| 734 | 643954 | 16, 17 (Colon Tumor Tissue vs. Colon Metastasis) | 6 | 0 | 6.09 | |
| 735 | 456506 | 15, 17 (Normal Colon Tissue vs. Colon Metastasis) | 17 | 7 | 2.61 | |
| 736 | 449269 | 15, 17 (Normal Colon Tissue vs. Colon Metastasis) | 26 | 7 | 3.99 | |
| | | 15, 16 (Normal Colon vs. Colon Tumor Tissue) | 26 | 5 | 5.5 | |
| 737 | 732712 | 15, 16 (Normal Colon vs. Colon Tumor Tissue) | 0 | 7 | | 6.62 |
| | | 16, 17 (Colon Tumor Tissue vs. Colon Metastasis) | 7 | 0 | 7.11 | |
| 738 | 696 | 01, 02 (Colon, High Met vs. Colon, Low Met) | 24 | 87 | | 3.93 |
| | | 03, 04 (Breast, High Met vs. Breast, Non-Met) | 37 | 13 | 2.78 | |
| 739 | 456528 | 15, 16 (Normal Colon vs. Colon Tumor Tissue) | 0 | 7 | | 6.62 |
| 740 | 4043 | 01, 02 (Colon, High Met vs. Colon, Low Met) | 1 | 9 | | 9.76 |
| 741 | 3639 | 03, 04 (Breast, High Met vs. Breast, Non-Met) | 12 | 3 | 3.9 | |
| 742 | 1024 | 03, 04 (Breast, High Met vs. Breast, Non-Met) | 0 | 292 | | 299.28 |
| | | 08, 09 (Lung, High Met vs. Lung, Low Met) | 41 | 11 | 5.21 | |
| 743 | 1247 | 03, 04 (Breast, High Met vs. Breast, Non-Met) | 51 | 15 | 3.32 | |
| 744 | 4934 | 01, 02 (Colon, High Met vs. Colon, Low Met) | 1 | 9 | | 9.76 |
| 745 | 901 | 03, 04 (Breast, High Met vs. Breast, Non-Met) | 56 | 5 | 10.93 | |
| 746 | 452726 | 16, 17 (Colon Tumor Tissue vs. Colon Metastasis) | 8 | 1 | 8.12 | |
| 747 | 725825 | 16, 17 (Colon Tumor Tissue vs. Colon Metastasis) | 8 | 0 | 8.12 | |
| | | 15, 16 (Normal Colon vs. Colon Tumor Tissue) | 0 | 8 | | 7.57 |
| 748 | 456808 | 15, 16 (Normal Colon vs. Colon Tumor Tissue) | 7 | 42 | | 5.68 |
| | | 16, 17 (Colon Tumor Tissue vs. Colon Metastasis) | 42 | 1 | 42.65 | |
| 749 | 729295 | 15, 16 (Normal Colon vs. Colon Tumor Tissue) | 0 | 7 | | 6.62 |
| | | 16, 17 (Colon Tumor Tissue vs. Colon Metastasis) | 7 | 0 | 7.11 | |
| 750 | 551907 | 15, 16 (Normal Colon vs. Colon Tumor Tissue) | 7 | 0 | 7.4 | |
| 751 | 551527 | 15, 17 (Normal Colon Tissue vs. Colon Metastasis) | 0 | 7 | | 6.52 |
| 752 | 7098 | 03, 04 (Breast, High Met vs. Breast, Non-Met) | 10 | 0 | 9.76 | |
| 753 | 4589 | 01, 02 (Colon, High Met vs. Colon, Low Met) | 14 | 2 | 6.46 | |
| 754 | 554812 | 15, 17 (Normal Colon Tissue vs. Colon Metastasis) | 0 | 8 | | 7.45 |
| | | 16, 17 (Colon Tumor Tissue vs. Colon Metastasis) | 1 | 8 | | 7.88 |
| 755 | 3114 | 03, 04 (Breast, High Met vs. Breast, Non-Met) | 9 | 1 | 8.78 | |
| 756 | 6031 | 01, 02 (Colon, High Met vs. Colon, Low Met) | 9 | 1 | 8.3 | |
| 757 | 185628 | 03, 04 (Breast, High Met vs. Breast, Non-Met) | 0 | 6 | | 6.15 |
| 758 | 24719 | 03, 04 (Breast, High Met vs. Breast, Non-Met) | 4 | 26 | | 6.66 |
| | | 21, 22 (Normal Prostate vs. Prostate Cancer) | 4 | 14 | | 3.56 |
| 759 | 3428 | 03, 04 (Breast, High Met vs. Breast, Non-Met) | 20 | 0 | 19.51 | |
| 760 | 2676 | 01, 02 (Colon, High Met vs. Colon, Low Met) | 2 | 17 | | 9.22 |
| 761 | 649148 | 15, 17 (Normal Colon Tissue vs. Colon Metastasis) | 8 | 0 | 8.59 | |
| 762 | 234605 | 23, 24 (Normal Lung Tissue vs. Lung Tumor Tissue) | 17 | 5 | 3.43 | |
| | | 16, 17 (Colon Tumor Tissue vs. Colon Metastasis) | 39 | 14 | 2.83 | |
| | | 15, 17 (Normal Colon Tissue vs. Colon Metastasis) | 32 | 14 | 2.45 | |
| 763 | 2224 | 03, 04 (Breast, High Met vs. Breast, Non-Met) | 44 | 8 | 5.37 | |
| 764 | 185642 | 03, 04 (Breast, High Met vs. Breast, Non-Met) | 0 | 7 | | 7.17 |
| 765 | 649655 | 15, 17 (Normal Colon Tissue vs. Colon Metastasis) | 6 | 0 | 6.44 | |
| | | 16, 17 (Colon Tumor Tissue vs. Colon Metastasis) | 12 | 0 | 12.19 | |
| 766 | 2854 | 03, 04 (Breast, High Met vs. Breast, Non-Met) | 31 | 3 | 10.08 | |
| 767 | 453470 | 15, 16 (Normal Colon vs. Colon Tumor Tissue) | 12 | 1 | 12.68 | |
| | | 15, 17 (Normal Colon Tissue vs. Colon Metastasis) | 12 | 1 | 12.88 | |
| 768 | 11012 | 01, 02 (Colon, High Met vs. Colon, Low Met) | 0 | 6 | | 6.5 |
| 769 | 535208 | 15, 16 (Normal Colon vs. Colon Tumor Tissue) | 6 | 0 | 6.34 | |
| | | 15, 17 (Normal Colon Tissue vs. Colon Metastasis) | 6 | 0 | 6.44 | |
| 770 | 448606 | 15, 17 (Normal Colon Tissue vs. Colon Metastasis) | 3 | 20 | | 6.21 |
| 771 | 12304 | 03, 04 (Breast, High Met vs. Breast, Non-Met) | 5 | 17 | | 3.48 |
| 772 | 2756 | 01, 02 (Colon, High Met vs. Colon, Low Met) | 28 | 8 | 3.23 | |
| 773 | 367 | 08, 09 (Lung, High Met vs. Lung, Low Met) | 30 | 99 | | 2.36 |
| | | 03, 04 (Breast, High Met vs. Breast, Non-Met) | 105 | 24 | 4.27 | |
| | | 01, 02 (Colon, High Met vs. Colon, Low Met) | 19 | 97 | | 5.53 |
| | | 15, 16 (Normal Colon vs. Colon Tumor Tissue) | 13 | 4 | 3.44 | |
| 774 | 11351 | 01, 02 (Colon, High Met vs. Colon, Low Met) | 0 | 6 | | 6.5 |
| 775 | 6858 | 01, 02 (Colon, High Met vs. Colon, Low Met) | 0 | 8 | | 8.67 |
| 776 | 7750 | 03, 04 (Breast, High Met vs. Breast, Non-Met) | 1 | 14 | | 14.35 |
| 777 | 6923 | 03, 04 (Breast, High Met vs. Breast, Non-Met) | 6 | 0 | 5.85 | |
| 778 | 11552 | 03, 04 (Breast, High Met vs. Breast, Non-Met) | 6 | 0 | 5.85 | |
| 779 | 12448 | 03, 04 (Breast, High Met vs. Breast, Non-Met) | 0 | 7 | | 7.17 |
| 781 | 10342 | 03, 04 (Breast, High Met vs. Breast, Non-Met) | 7 | 0 | 6.83 | |
| 782 | 9026 | 01, 02 (Colon, High Met vs. Colon, Low Met) | 7 | 0 | 6.46 | |
| 783 | 10342 | 03, 04 (Breast, High Met vs. Breast, Non-Met) | 7 | 0 | 6.83 | |
| 784 | 6455 | 03, 04 (Breast, High Met vs. Breast, Non-Met) | 6 | 0 | 5.85 | |
| 785 | 6455 | 03, 04 (Breast, High Met vs. Breast, Non-Met) | 6 | 0 | 5.85 | |
| 786 | 3416 | 01, 02 (Colon, High Met vs. Colon, Low Met) | 1 | 11 | | 11.93 |
| 787 | 3416 | 01, 02 (Colon, High Met vs. Colon, Low Met) | 1 | 11 | | 11.93 |
| 788 | 2889 | 01, 02 (Colon, High Met vs. Colon, Low Met) | 8 | 19 | | 2.57 |
| 789 | 7393 | 03, 04 (Breast, High Met vs. Breast, Non-Met) | 0 | 8 | | 8.2 |
| 790 | 14390 | 03, 04 (Breast, High Met vs. Breast, Non-Met) | 2 | 43 | | 22.04 |
| 791 | 661 | 03, 04 (Breast, High Met vs. Breast, Non-Met) | 77 | 10 | 7.51 | |
| | | 08, 09 (Lung, High Met vs. Lung, Low Met) | 0 | 10 | | 7.16 |
| 792 | 452992 | 15, 17 (Normal Colon Tissue vs. Colon Metastasis) | 7 | 0 | 7.51 | |
| 793 | 1943 | 03, 04 (Breast, High Met vs. Breast, Non-Met) | 16 | 4 | 3.9 | |
| | | 01, 02 (Colon, High Met vs. Colon, Low Met) | 9 | 29 | | 3.49 |
| | | 15, 16 (Normal Colon vs. Colon Tumor Tissue) | 6 | 19 | | 3 |
| 794 | 2027 | 03, 04 (Breast, High Met vs. Breast, Non-Met) | 12 | 35 | | 2.99 |
| 795 | 5482 | 01, 02 (Colon, High Met vs. Colon, Low Met) | 1 | 8 | | 8.67 |
| 796 | 650493 | 15, 17 (Normal Colon Tissue vs. Colon Metastasis) | 7 | 0 | 7.51 | |
| 797 | 640318 | 15, 17 (Normal Colon Tissue vs. Colon Metastasis) | 6 | 0 | 6.44 | |
| 798 | 646309 | 16, 17 (Colon Tumor Tissue vs. Colon Metastasis) | 6 | 0 | 6.09 | |
| 799 | 4316 | 03, 04 (Breast, High Met vs. Breast, Non-Met) | 0 | 6 | | 6.15 |
| 800 | 449701 | 16, 17 (Colon Tumor Tissue vs. Colon Metastasis) | 17 | 1 | 17.26 | |
| | | 15, 16 (Normal Colon vs. Colon Tumor Tissue) | 1 | 17 | | 16.08 |
| 801 | 560367 | 15, 16 (Normal Colon vs. Colon Tumor Tissue) | 0 | 9 | | 8.51 |
| 802 | 9997 | 03, 04 (Breast, High Met vs. Breast, Non-Met) | 7 | 0 | 6.83 | |
| 803 | 649106 | 15, 17 (Normal Colon Tissue vs. Colon Metastasis) | 7 | 0 | 7.51 | |
| 804 | 461835 | 15, 16 (Normal Colon vs. Colon Tumor Tissue) | 7 | 0 | 7.4 | |
| 805 | 640590 | 15, 17 (Normal Colon Tissue vs. Colon Metastasis) | 9 | 0 | 9.66 | |
| | | 15, 16 (Normal Colon vs. Colon Tumor Tissue) | 9 | 1 | 9.51 | |
| 806 | 648340 | 15, 17 (Normal Colon Tissue vs. Colon Metastasis) | 6 | 0 | 6.44 | |
| 807 | 554812 | 15, 17 (Normal Colon Tissue vs. Colon Metastasis) | 0 | 8 | | 7.45 |
| | | 16, 17 (Colon Tumor Tissue vs. Colon Metastasis) | 1 | 8 | | 7.88 |
| 808 | 447035 | 16, 17 (Colon Tumor Tissue vs. Colon Metastasis) | 8 | 1 | 8.12 | |
| 809 | 1208 | 03, 04 (Breast, High Met vs. Breast, Non-Met) | 13 | 0 | 12.68 | |
| 810 | 3114 | 03, 04 (Breast, High Met vs. Breast, Non-Met) | 9 | 1 | 8.78 | |
| 811 | 3114 | 03, 04 (Breast, High Met vs. Breast, Non-Met) | 9 | 1 | 8.78 | |
| 812 | 734078 | 15, 16 (Normal Colon vs. Colon Tumor Tissue) | 0 | 7 | | 6.62 |
| | | 16, 17 (Colon Tumor Tissue vs. Colon Metastasis) | 7 | 0 | 7.11 | |
| 813 | 450323 | 15, 17 (Normal Colon Tissue vs. Colon Metastasis) | 0 | 8 | | 7.45 |
| 814 | 11567 | 03, 04 (Breast, High Met vs. Breast, Non-Met) | 7 | 0 | 6.83 | |
| 815 | 11567 | 03, 04 (Breast, High Met vs. Breast, Non-Met) | 7 | 0 | 6.83 | |
| 816 | 6660 | 01, 02 (Colon, High Met vs. Colon, Low Met) | 7 | 0 | 6.46 | |
| 817 | 9026 | 01, 02 (Colon, High Met vs. Colon, Low Met) | 7 | 0 | 6.46 | |
| 818 | 185539 | 03, 04 (Breast, High Met vs. Breast, Non-Met) | 0 | 10 | | 10.25 |
| 819 | 3224 | 01, 02 (Colon, High Met vs. Colon, Low Met) | 17 | 2 | 7.84 | |
| 820 | 95700 | 03, 04 (Breast, High Met vs. Breast, Non-Met) | 1 | 21 | | 21.52 |
| 821 | 4439 | 08, 09 (Lung, High Met vs. Lung, Low Met) | 10 | 2 | 6.99 | |
| | | 01, 02 (Colon, High Met vs. Colon, Low Met) | 15 | 2 | 6.92 | |
| 822 | 3428 | 03, 04 (Breast, High Met vs. Breast, Non-Met) | 20 | 0 | 19.51 | |
| 823 | 1456 | 01, 02 (Colon, High Met vs. Colon, Low Met) | 9 | 22 | | 2.65 |
| | | 03, 04 (Breast, High Met vs. Breast, Non-Met) | 50 | 9 | 5.42 | |
| 824 | 11343 | 01, 02 (Colon, High Met vs. Colon, Low Met) | 0 | 6 | | 6.5 |
| 825 | 729206 | 15, 16 (Normal Colon vs. Colon Tumor Tissue) | 0 | 10 | | 9.46 |
| | | 16, 17 (Colon Tumor Tissue vs. Colon Metastasis) | 10 | 0 | 10.16 | |
| 826 | 558371 | 15, 16 (Normal Colon vs. Colon Tumor Tissue) | 10 | 2 | 5.28 | |
| | | 15, 17 (Normal Colon Tissue vs. Colon Metastasis) | 10 | 2 | 5.37 | |
| 827 | 451589 | 15, 17 (Normal Colon Tissue vs. Colon Metastasis) | 0 | 7 | | 6.52 |
| 828 | 404475 | 16, 17 (Colon Tumor Tissue vs. Colon Metastasis) | 11 | 2 | 5.59 | |
| | | 15, 17 (Normal Colon Tissue vs. Colon Metastasis) | 19 | 2 | 10.2 | |
| 829 | 734582 | 16, 17 (Colon Tumor Tissue vs. Colon Metastasis) | 6 | 0 | 6.09 | |
| | | 15, 16 (Normal Colon vs. Colon Tumor Tissue) | 0 | 6 | | 5.68 |
| 830 | 729779 | 15, 16 (Normal Colon vs. Colon Tumor Tissue) | 0 | 8 | | 7.57 |
| | | 16, 17 (Colon Tumor Tissue vs. Colon Metastasis) | 8 | 0 | 8.12 | |
| 831 | 555244 | 16, 17 (Colon Tumor Tissue vs. Colon Metastasis) | 0 | 11 | | 10.83 |
| 832 | 449269 | 15, 17 (Normal Colon Tissue vs. Colon Metastasis) | 26 | 7 | 3.99 | |
| | | 15, 16 (Normal Colon vs. Colon Tumor Tissue) | 26 | 5 | 5.5 | |
| 833 | 4609 | 01, 02 (Colon, High Met vs. Colon, Low Met) | 2 | 12 | | 6.5 |
| 834 | 640318 | 15, 17 (Normal Colon Tissue vs. Colon Metastasis) | 6 | 0 | 6.44 | |
| 835 | 729851 | 16, 17 (Colon Tumor Tissue vs. Colon Metastasis) | 7 | 0 | 7.11 | |
| | | 15, 16 (Normal Colon vs. Colon Tumor Tissue) | 0 | 7 | | 6.62 |
| 836 | 11028 | 01, 02 (Colon, High Met vs. Colon, Low Met) | 0 | 6 | | 6.5 |
| 837 | 643924 | 15, 17 (Normal Colon Tissue vs. Colon Metastasis) | 6 | 0 | 6.44 | |
| | | 15, 16 (Normal Colon vs. Colon Tumor Tissue) | 6 | 0 | 6.34 | |
| 838 | 630259 | 15, 16 (Normal) Colon vs. Colon Tumor Tissue) | 7 | 0 | 7.4 | |
| 839 | 11286 | 01, 02 (Colon, High Met vs. Colon, Low Met) | 0 | 6 | | 6.5 |
| 840 | 185651 | 03, 04 (Breast, High Met vs. Breast, Non-Met) | 0 | 7 | | 7.17 |
| 841 | 7379 | 01, 02 (Colon, High Met vs. Colon, Low Met) | 0 | 6 | | 6.5 |
| 842 | 728408 | 15, 16 (Normal Colon vs. Colon Tumor Tissue) | 0 | 12 | | 11.35 |
| | | 16, 17 (Colon Tumor Tissue vs. Colon Metastasis) | 12 | 0 | 12.19 | |
| 843 | 646309 | 16, 17 (Colon Tumor Tissue vs. Colon Metastasis) | 6 | 0 | 6.09 | |
| 844 | 405073 | 15, 16 (Normal Colon vs. Colon Tumor Tissue) | 6 | 0 | 6.34 | |
| | | 15, 17 (Normal Colon Tissue vs. Colon Metastasis) | 6 | 0 | 6.44 | |
| 845 | 185489 | 03, 04 (Breast, High Met vs. Breast, Non-Met) | 0 | 12 | | 12.3 |
| 846 | 447326 | 15, 17 (Normal Colon Tissue vs. Colon Metastasis) | 6 | 0 | 6.44 | |
| 847 | 11006 | 01, 02 (Colon, High Met vs. Colon, Low Met) | 0 | 6 | | 6.5 |
| 848 | 6863 | 01, 02 (Colon, High Met vs. Colon, Low Met) | 1 | 8 | | 8.67 |
| 849 | 11351 | 01, 02 (Colon, High Met vs. Colon, Low Met) | 0 | 6 | | 6.5 |
| 850 | 401553 | 15, 17 (Normal Colon Tissue vs. Colon Metastasis) | 8 | 0 | 8.59 | |
| 851 | 504513 | 15, 17 (Normal Colon Tissue vs. Colon Metastasis) | 6 | 0 | 6.44 | |
| 852 | 645979 | 16, 17 (Colon Tumor Tissue vs. Colon Metastasis) | 7 | 0 | 7.11 | |
| 853 | 6923 | 03, 04 (Breast, High Met vs. Breast, Non-Met) | 6 | 0 | 5.85 | |
| 854 | 1924 | 01, 02 (Colon, High Met vs. Colon, Low Met) | 8 | 21 | | 2.85 |
| 855 | 5838 | 01, 02 (Colon, High Met vs. Colon, Low Met) | 1 | 9 | | 9.76 |
| 856 | 2062 | 13, 14 (bFGF Treated HMVEC vs. VEGF-Treated HMVEC) (bFGF | 0 | 7 | | 6.88 |
| | | Treated HMVEC vs. VEGF-Treated HMVEC) | | | | |
| | | 03, 04 (Breast, High Met vs. Breast, Non-Met) | 8 | 19 | | 2.43 |
| | | 01, 02 (Colon, High Met vs. Colon, Low Met) | 9 | 39 | | 4.7 |
| 857 | 447388 | 15, 17 (Normal Colon Tissue vs. Colon Metastasis) | 142 | 4 | 38.1 | |
| | | 18, 19 (Normal Colon Tissue vs. Colon Tumor) | 18 | 0 | 20.57 | |
| | | 18, 20 (Normal Colon Tissue vs. Colon Metastasis) | 18 | 0 | 15.39 | |
| | | 15, 16 (Normal Colon vs. Colon Tumor Tissue) | 142 | 2 | 75.05 | |
| 858 | 12419 | 03, 04 (Breast, High Met vs. Breast, Non-Met) | 0 | 15 | | 15.37 |
| 859 | 3224 | 01, 02 (Colon, High Met vs. Colon, Low Met) | 17 | 2 | 7.84 | |
| 860 | 5474 | 03, 04 (Breast, High Met vs. Breast, Non-Met) | 5 | 17 | | 3.48 |
| | | 01, 02 (Colon, High Met vs. Colon, Low Met) | 1 | 8 | | 8.67 |
| 861 | 3522 | 01, 02 (Colon, High Met vs. Colon, Low Met) | 3 | 12 | | 4.34 |
| 862 | 731785 | 16, 17 (Colon Tumor Tissue vs. Colon Metastasis) | 6 | 0 | 6.09 | |
| | | 15, 16 (Normal Colon vs. Colon Tumor Tissue) | 0 | 6 | | 5.68 |
| 863 | 3765 | 01, 02 (Colon, High Met vs. Colon, Low Met) | 19 | 6 | 2.92 | |
| 864 | 640323 | 16, 17 (Colon Tumor Tissue vs. Colon Metastasis) | 6 | 0 | 6.09 | |
| | | 15, 17 (Normal Colon Tissue vs. Colon Metastasis) | 8 | 0 | 8.59 | |
| 865 | 379105 | 15, 16 (Normal Colon vs. Colon Tumor Tissue) | 0 | 8 | | 7.57 |
| 866 | 448029 | 16, 17 (Colon Tumor Tissue vs. Colon Metastasis) | 10 | 1 | 10.16 | |
| 867 | 650476 | 15, 17 (Normal Colon Tissue vs. Colon Metastasis) | 7 | 0 | 7.51 | |
| 868 | 640525 | 15, 16 (Normal Colon vs. Colon Tumor Tissue) | 7 | 0 | 7.4 | |
| | | 15, 17 (Normal Colon Tissue vs. Colon Metastasis) | 7 | 0 | 7.51 | |
| 869 | 390124 | 15, 17 (Normal Colon Tissue vs. Colon Metastasis) | 6 | 18 | | 2.79 |
| | | 19, 20 (Colon Tumor Tissue vs. Colon Metastasis) | 8 | 0 | 5.98 | |
| | | 18, 19 (Normal Colon Tissue vs. Colon Tumor) | 0 | 8 | | 7 |
| 870 | 464029 | 16, 17 (Colon Tumor Tissue vs. Colon Metastasis) | 1 | 9 | | 8.86 |
| 871 | 468109 | 15, 17 (Normal Colon Tissue vs. Colon Metastasis) | 6 | 0 | 6.44 | |
| 872 | 21669 | 16, 17 (Colon Tumor Tissue vs. Colon Metastasis) | 0 | 7 | | 6.89 |
| 873 | 651088 | 15, 17 (Normal Colon Tissue vs. Colon Metastasis) | 6 | 0 | 6.44 | |
| 874 | 2737 | 16, 17 (Colon Tumor Tissue vs. Colon Metastasis) | 3 | 14 | | 4.6 |
| | | 15, 17 (Normal Colon Tissue vs. Colon Metastasis) | 4 | 14 | | 3.26 |
| 875 | 556421 | 15, 16 (Normal Colon vs. Colon Tumor Tissue) | 12 | 1 | 12.68 | |
| 876 | 452245 | 16, 17 (Colon Tumor Tissue vs. Colon Metastasis) | 1 | 12 | | 11.82 |
| | | 15, 17 (Normal Colon Tissue vs. Colon Metastasis) | 1 | 12 | | 11.18 |
| 877 | 447539 | 15, 17 (Normal Colon Tissue vs. Colon Metastasis) | 8 | 0 | 8.59 | |
| | | 15, 16 (Normal Colon vs. Colon Tumor Tissue) | 8 | 1 | 8.46 | |
| 878 | 546642 | 16, 17 (Colon Tumor Tissue vs. Colon Metastasis) | 11 | 0 | 11.17 | |
| 879 | 236368 | 15, 16 (Normal Colon vs. Colon Tumor Tissue) | 271 | 16 | 17.9 | |
| | | 15, 17 (Normal Colon Tissue vs. Colon Metastasis) | 271 | 0 | 290.88 | |
| | | 16, 17 (Colon Tumor Tissue vs. Colon Metastasis) | 16 | 0 | 16.25 | |
| | | 18, 19 (Normal Colon Tissue vs. Colon Tumor) | 9 | 1 | 10.29 | |
| | | 18, 20 (Normal Colon Tissue vs. Colon Metastasis) | 9 | 0 | 7.69 | |
| 880 | 644523 | 16, 17 (Colon Tumor Tissue vs. Colon Metastasis) | 6 | 0 | 6.09 | |
| 881 | 729173 | 16, 17 (Colon Tumor Tissue vs. Colon Metastasis) | 8 | 0 | 8.12 | |
| | | 15, 16 (Normal Colon vs. Colon Tumor Tissue) | 0 | 8 | | 7.57 |
| 882 | 8315 | 03, 04 (Breast, High Met vs. Breast, Non-Met) | 6 | 0 | 5.85 | |
| 883 | 450463 | 15, 16 (Normal Colon vs. Colon Tumor Tissue) | 31 | 13 | 2.52 | |
| 884 | 650856 | 16, 17 (Colon Tumor Tissue vs. Colon Metastasis) | 6 | 0 | 6.09 | |
| 885 | 648109 | 15, 16 (Normal Colon vs. Colon Tumor Tissue) | 8 | 1 | 8.46 | |
| | | 15, 17 (Normal Colon Tissue vs. Colon Metastasis) | 8 | 0 | 8.59 | |
| 886 | 726644 | 16, 17 (Colon Tumor Tissue vs. Colon Metastasis) | 18 | 0 | 18.28 | |
| | | 15, 16 (Normal Colon vs. Colon Tumor Tissue) | 0 | 18 | | 17.03 |
| 887 | 727224 | 16, 17 (Colon Tumor Tissue vs. Colon Metastasis) | 8 | 0 | 8.12 | |
| | | 15, 16 (Normal Colon vs. Colon Tumor Tissue) | 0 | 8 | | 7.57 |
| 888 | 557906 | 15, 16 (Normal Colon vs. Colon Tumor Tissue) | 12 | 3 | 4.23 | |
| 889 | 502683 | 15, 16 (Normal Colon vs. Colon Tumor Tissue) | 6 | 0 | 6.34 | |
| 890 | 728408 | 15, 16 (Normal Colon vs. Colon Tumor Tissue) | 0 | 12 | | 11.35 |
| | | 16, 17 (Colon Tumor Tissue vs. Colon Metastasis) | 12 | 0 | 12.19 | |
| 891 | 647952 | 15, 16 (Normal Colon vs. Colon Tumor Tissue) | 6 | 0 | 6.34 | |
| | | 15, 17 (Normal Colon Tissue vs. Colon Metastasis) | 6 | 0 | 6.44 | |
| 892 | 639991 | 15, 17 (Normal Colon Tissue vs. Colon Metastasis) | 6 | 0 | 6.44 | |
| 893 | 735346 | 16, 17 (Colon Tumor Tissue vs. Colon Metastasis) | 6 | 0 | 6.09 | |
| | | 15, 16 (Normal Colon vs. Colon Tumor Tissue) | 0 | 6 | | 5.68 |
| 894 | 102655 | 15, 16 (Normal Colon vs. Colon Tumor Tissue) | 14 | 0 | 14.8 | |
| | | 15, 17 (Normal Colon Tissue vs. Colon Metastasis) | 14 | 0 | 15.03 | |
| | | 03, 04 (Breast, High Met vs. Breast, Non-Met) | 4 | 33 | | 8.46 |
| 895 | 553629 | 16, 17 (Colon Tumor Tissue vs. Colon Metastasis) | 4 | 17 | | 4.19 |
| | | 15, 17 (Normal Colon Tissue vs. Colon Metastasis) | 4 | 17 | | 3.96 |
| 896 | 1609 | 01, 02 (Colon, High Met vs. Colon, Low Met) | 3 | 58 | | 20.96 |
| | | 03, 04 (Breast, High Met vs. Breast, Non-Met) | 10 | 2 | 4.88 | |
| | | 15, 17 (Normal Colon Tissue vs. Colon Metastasis) | 15 | 3 | 5.37 | |
| | | 16, 17 (Colon Tumor Tissue vs. Colon Metastasis) | 14 | 3 | 4.74 | |
| 897 | 641884 | 15, 17 (Normal Colon Tissue vs. Colon Metastasis) | 8 | 0 | 8.59 | |
| | | 16, 17 (Colon Tumor Tissue vs. Colon Metastasis) | 7 | 0 | 7.11 | |
| 898 | 648872 | 15, 17 (Normal Colon Tissue vs. Colon Metastasis) | 6 | 0 | 6.44 | |
| | | 15, 16 (Normal Colon vs. Colon Tumor Tissue) | 6 | 0 | 6.34 | |
| 899 | 644242 | 15, 17 (Normal Colon Tissue vs. Colon Metastasis) | 6 | 0 | 6.44 | |
| | | 15, 16 (Normal Colon vs. Colon Tumor Tissue) | 6 | 0 | 6.34 | |
| 900 | 63559 | 03, 04 (Breast, High Met vs. Breast, Non-Met) | 2 | 12 | | 6.15 |
| 901 | 550108 | 15, 17 (Normal Colon Tissue vs. Colon Metastasis) | 6 | 37 | | 5.75 |
| | | 15, 16 (Normal Colon vs. Colon Tumor Tissue) | 6 | 19 | | 3 |
| 902 | 374306 | 15, 17 (Normal Colon Tissue vs. Colon Metastasis) | 1 | 10 | | 9.32 |
| 903 | 5838 | 01, 02 (Colon, High Met vs. Colon, Low Met) | 1 | 9 | | 9.76 |
| 904 | 645530 | 15, 17 (Normal Colon Tissue vs. Colon Metastasis) | 10 | 0 | 10.73 | |
| | | 15, 16 (Normal Colon vs. Colon Tumor Tissue) | 10 | 2 | 5.28 | |
| 905 | 649732 | 16, 17 (Colon Tumor Tissue vs. Colon Metastasis) | 7 | 0 | 7.11 | |
| 906 | 649143 | 15, 16 (Normal Colon vs. Colon Tumor Tissue) | 6 | 0 | 6.34 | |
| | | 15, 17 (Normal Colon Tissue vs. Colon Metastasis) | 6 | 0 | 6.44 | |
| 907 | 7571 | 01, 02 (Colon, High Met vs. Colon, Low Met) | 0 | 8 | | 8.67 |
| 908 | 4572 | 03, 04 (Breast, High Met vs. Breast, Non-Met) | 2 | 11 | | 5.64 |
| 909 | 2147 | 01, 02 (Colon, High Met vs. Colon, Low Met) | 31 | 6 | 4.77 | |
| | | 03, 04 (Breast, High Met vs. Breast, Non-Met) | 12 | 2 | 5.85 | |
| 910 | 462659 | 15, 17 (Normal Colon Tissue vs. Colon Metastasis) | 7 | 0 | 7.51 | |
| | | 15, 16 (Normal Colon vs. Colon Tumor Tissue) | 7 | 0 | 7.4 | |
| 911 | 727723 | 16, 17 (Colon Tumor Tissue vs. Colon Metastasis) | 6 | 0 | 6.09 | |
| | | 15, 16 (Normal Colon vs. Colon Tumor Tissue) | 0 | 6 | | 5.68 |
| 912 | 2636 | 08, 09 (Lung, High Met vs. Lung, Low Met) | 7 | 1 | 9.78 | |
| | | 01, 02 (Colon, High Met vs. Colon, Low Met) | 8 | 19 | | 2.57 |
| 913 | 500959 | 15, 17 (Normal Colon Tissue vs. Colon Metastasis) | 8 | 0 | 8.59 | |
| | | 15, 16 (Normal Colon vs. Colon Tumor Tissue) | 8 | 0 | 8.46 | |
| 914 | 3428 | 03, 04 (Breast, High Met vs. Breast, Non-Met) | 20 | 0 | 19.51 | |
| 915 | 734929 | 15, 16 (Normal Colon vs. Colon Tumor Tissue) | 0 | 6 | | 5.68 |
| | | 16, 17 (Colon Tumor Tissue vs. Colon Metastasis) | 6 | 0 | 6.09 | |
| 916 | 453592 | 15, 16 (Normal Colon vs. Colon Tumor Tissue) | 19 | 6 | 3.35 | |
| 917 | 15414 | 15, 17 (Normal Colon Tissue vs. Colon Metastasis) | 1 | 9 | | 8.38 |
| 918 | 648959 | 15, 17 (Normal Colon Tissue vs. Colon Metastasis) | 7 | 0 | 7.51 | |
| | | 15, 16 (Normal Colon vs. Colon Tumor Tissue) | 7 | 0 | 7.4 | |
| 919 | 453470 | 15, 17 (Normal Colon Tissue vs. Colon Metastasis) | 12 | 1 | 12.88 | |
| | | 15, 16 (Normal Colon vs. Colon Tumor Tissue) | 12 | 1 | 12.68 | |
| 920 | 649272 | 16, 17 (Colon Tumor Tissue vs. Colon Metastasis) | 8 | 0 | 8.12 | |
| 921 | 1699 | 15, 16 (Normal Colon vs. Colon Tumor Tissue) | 1 | 10 | | 9.46 |
| | | 03, 04 (Breast, High Met vs. Breast, Non-Met) | 37 | 12 | 3.01 | |
| 922 | 649719 | 15, 17 (Normal Colon Tissue vs. Colon Metastasis) | 6 | 0 | 6.44 | |
| 923 | 562805 | 16, 17 (Colon Tumor Tissue vs. Colon Metastasis) | 0 | 6 | | 5.91 |
| 924 | 452204 | 16, 17 (Colon Tumor Tissue vs. Colon Metastasis) | 1 | 8 | | 7.88 |
| | | 23, 24 (Normal Lung Tissue vs. Lung Tumor Tissue) | 3 | 13 | | 4.29 |
| | | 15, 16 (Normal Colon vs. Colon Tumor Tissue) | 9 | 1 | 9.51 | |
| 925 | 549178 | 16, 17 (Colon Tumor Tissue vs. Colon Metastasis) | 0 | 10 | | 9.85 |
| | | 15, 17 (Normal Colon Tissue vs. Colon Metastasis) | 1 | 10 | | 9.32 |
| 926 | 639177 | 15, 17 (Normal Colon Tissue vs. Colon Metastasis) | 6 | 0 | 6.44 | |
| 927 | 562550 | 16, 17 (Colon Tumor Tissue vs. Colon Metastasis) | 0 | 6 | | 5.91 |
| 928 | 561807 | 16, 17 (Colon Tumor Tissue vs. Colon Metastasis) | 1 | 8 | | 7.88 |
| 929 | 641373 | 15, 17 (Normal Colon Tissue vs. Colon Metastasis) | 15 | 0 | 16.1 | |
| | | 15, 16 (Normal Colon vs. Colon Tumor Tissue) | 15 | 3 | 5.28 | |
| 930 | 514418 | 16, 17 (Colon Tumor Tissue vs. Colon Metastasis) | 0 | 9 | | 8.86 |
| | | 15, 17 (Normal Colon Tissue vs. Colon Metastasis) | 1 | 9 | | 8.38 |
| 931 | 567078 | 16, 17 (Colon Tumor Tissue vs. Colon Metastasis) | 11 | 1 | 11.17 | |
| 932 | 643061 | 15, 17 (Normal Colon Tissue vs. Colon Metastasis) | 8 | 0 | 8.59 | |
| | | 15, 16 (Normal Colon vs. Colon Tumor Tissue) | 8 | 1 | 8.46 | |
| 933 | 549160 | 15, 17 (Normal Colon Tissue vs. Colon Metastasis) | 0 | 7 | | 6.52 |
| 934 | 449269 | 15, 17 (Normal Colon Tissue vs. Colon Metastasis) | 26 | 7 | 3.99 | |
| | | 15, 16 (Normal Colon vs. Colon Tumor Tissue) | 26 | 5 | 5.5 | |
| 935 | 453082 | 15, 17 (Normal Colon Tissue vs. Colon Metastasis) | 6 | 0 | 6.44 | |
| | | 15, 16 (Normal Colon vs. Colon Tumor Tissue) | 6 | 0 | 6.34 | |
| 936 | 418135 | 16, 17 (Colon Tumor Tissue vs. Colon Metastasis) | 6 | 23 | | 3.77 |
| | | 15, 17 (Normal Colon Tissue vs. Colon Metastasis) | 1 | 23 | | 21.43 |
| 937 | 2783 | 01, 02 (Colon, High Met vs. Colon, Low Met) | 27 | 6 | 4.15 | |
| | | 03, 04 (Breast, High Met vs. Breast, Non-Met) | 5 | 40 | | 8.2 |
| | | 15, 16 (Normal Colon vs. Colon Tumor Tissue) | 6 | 0 | 6.34 | |
| 938 | 549435 | 15, 16 (Normal Colon vs. Colon Tumor Tissue) | 14 | 2 | 7.4 | |
| 939 | 446614 | 16, 17 (Colon Tumor Tissue vs. Colon Metastasis) | 7 | 0 | 7.11 | |
| 940 | 449477 | 15, 17 (Normal Colon Tissue vs. Colon Metastasis) | 2 | 12 | | 5.59 |
| 941 | 454380 | 15, 16 (Normal Colon vs. Colon Tumor Tissue) | 3 | 14 | | 4.42 |
| 942 | 450914 | 15, 16 (Normal Colon vs. Colon Tumor Tissue) | 0 | 6 | | 5.68 |
| 943 | 736860 | 15, 16 (Normal Colon vs. Colon Tumor Tissue) | 0 | 6 | | 5.68 |
| | | 16, 17 (Colon Tumor Tissue vs. Colon Metastasis) | 6 | 0 | 6.09 | |
| 944 | 727224 | 15, 16 (Normal Colon vs. Colon Tumor Tissue) | 0 | 8 | | 7.57 |
| | | 16, 17 (Colon Tumor Tissue vs. Colon Metastasis) | 8 | 0 | 8.12 | |
| 945 | 644242 | 15, 17 (Normal Colon Tissue vs. Colon Metastasis) | 6 | 0 | 6.44 | |
| | | 15, 16 (Normal Colon vs. Colon Tumor Tissue) | 6 | 0 | 6.34 | |
| 946 | 562550 | 16, 17 (Colon Tumor Tissue vs. Colon Metastasis) | 0 | 6 | | 5.91 |
| 947 | 649148 | 15, 17 (Normal Colon Tissue vs. Colon Metastasis) | 8 | 0 | 8.59 | |
| 948 | 375889 | 15, 17 (Normal Colon Tissue vs. Colon Metastasis) | 0 | 7 | | 6.52 |
| 949 | 449437 | 15, 16 (Normal Colon vs. Colon Tumor Tissue) | 14 | 3 | 4.93 | |
| | | 16, 17 (Colon Tumor Tissue vs. Colon Metastasis) | 3 | 12 | | 3.94 |
| 950 | 449044 | 15, 17 (Normal Colon Tissue vs. Colon Metastasis) | 6 | 0 | 6.44 | |
| | | 16, 17 (Colon Tumor Tissue vs. Colon Metastasis) | 9 | 0 | 9.14 | |
| 951 | 555318 | 16, 17 (Colon Tumor Tissue vs. Colon Metastasis) | 2 | 12 | | 5.91 |
| 952 | 456764 | 16, 17 (Colon Tumor Tissue vs. Colon Metastasis) | 10 | 1 | 10.16 | |
| | | 15, 17 (Normal Colon Tissue vs. Colon Metastasis) | 14 | 1 | 15.03 | |
| 953 | 11567 | 03, 04 (Breast, High Met vs. Breast, Non-Met) | 7 | 0 | 6.83 | |
| 954 | 3522 | 01, 02 (Colon, High Met vs. Colon, Low Met) | 3 | 12 | | 4.34 |
| 955 | 456528 | 15, 16 (Normal Colon vs. Colon Tumor Tissue) | 0 | 7 | | 6.62 |
| 956 | 639142 | 15, 17 (Normal Colon Tissue vs. Colon Metastasis) | 8 | 0 | 8.59 | |
| 957 | 446371 | 15, 16 (Normal Colon vs. Colon Tumor Tissue) | 6 | 0 | 6.34 | |
| 958 | 554742 | 16, 17 (Colon Tumor Tissue vs. Colon Metastasis) | 0 | 6 | | 5.91 |
| 959 | 448029 | 16, 17 (Colon Tumor Tissue vs. Colon Metastasis) | 10 | 1 | 10.16 | |
| 960 | 551380 | 16, 17 (Colon Tumor Tissue vs. Colon Metastasis) | 4 | 14 | | 3.45 |
| 961 | 551527 | 15, 17 (Normal Colon Tissue vs. Colon Metastasis) | 0 | 7 | | 6.52 |
| 962 | 729295 | 16, 17 (Colon Tumor Tissue vs. Colon Metastasis) | 7 | 0 | 7.11 | |
| | | 15, 16 (Normal Colon vs. Colon Tumor Tissue) | 0 | 7 | | 6.62 |
| 963 | 349744 | 16, 17 (Colon Tumor Tissue vs. Colon Metastasis) | 0 | 6 | | 5.91 |
| 964 | 648996 | 15, 16 (Normal Colon vs. Colon Tumor Tissue) | 6 | 0 | 6.34 | |
| | | 15, 17 (Normal Colon Tissue vs. Colon Metastasis) | 6 | 0 | 6.44 | |
| 965 | 447126 | 15, 16 (Normal Colon vs. Colon Tumor Tissue) | 19 | 5 | 4.02 | |
| | | 16, 17 (Colon Tumor Tissue vs. Colon Metastasis) | 5 | 20 | | 3.94 |
| 966 | 730866 | 16, 17 (Colon Tumor Tissue vs. Colon Metastasis) | 8 | 0 | 8.12 | |
| | | 15, 16 (Normal Colon vs. Colon Tumor Tissue) | 0 | 8 | | 7.57 |
| 967 | 420686 | 16, 17 (Colon Tumor Tissue vs. Colon Metastasis) | 0 | 8 | | 7.88 |
| 968 | 451753 | 23, 24 (Normal Lung Tissue vs. Lung Tumor Tissue) | 1 | 12 | | 11.88 |
| | | 15, 16 (Normal Colon vs. Colon Tumor Tissue) | 4 | 15 | | 3.55 |
| 969 | 451380 | 15, 16 (Normal Colon vs. Colon Tumor Tissue) | 20 | 7 | 3.02 | |
| 970 | 645530 | 15, 16 (Normal Colon vs. Colon Tumor Tissue) | 10 | 2 | 5.28 | |
| | | 15, 17 (Normal Colon Tissue vs. Colon Metastasis) | 10 | 0 | 10.73 | |
| 971 | 554703 | 16, 17 (Colon Tumor Tissue vs. Colon Metastasis) | 1 | 9 | | 8.86 |
| | | 15, 17 (Normal Colon Tissue vs. Colon Metastasis) | 0 | 9 | | 8.38 |
| 972 | 562835 | 15, 17 (Normal Colon Tissue vs. Colon Metastasis) | 0 | 9 | | 8.38 |
| 973 | 732764 | 16, 17 (Colon Tumor Tissue vs. Colon Metastasis) | 7 | 0 | 7.11 | |
| | | 15, 16 (Normal Colon vs. Colon Tumor Tissue) | 0 | 7 | | 6.62 |
| 974 | 556216 | 16, 17 (Colon Tumor Tissue vs. Colon Metastasis) | 0 | 7 | | 6.89 |
| | | 15, 17 (Normal Colon Tissue vs. Colon Metastasis) | 0 | 7 | | 6.52 |
| 975 | 728779 | 15, 16 (Normal Colon vs. Colon Tumor Tissue) | 0 | 6 | | 5.68 |
| | | 16, 17 (Colon Tumor Tissue vs. Colon Metastasis) | 6 | 0 | 6.09 | |
| 976 | 414739 | 16, 17 (Colon Tumor Tissue vs. Colon Metastasis) | 2 | 14 | | 6.89 |
| | | 15, 17 (Normal Colon Tissue vs. Colon Metastasis) | 2 | 14 | | 6.52 |
| 977 | 551514 | 16, 17 (Colon Tumor Tissue vs. Colon Metastasis) | 1 | 13 | | 12.8 |
| | | 15, 16 (Normal Colon vs. Colon Tumor Tissue) | 8 | 1 | 8.46 | |
| 978 | 550107 | 15, 16 (Normal Colon vs. Colon Tumor Tissue) | 36 | 14 | 2.72 | |
| 979 | 726786 | 15, 16 (Normal Colon vs. Colon Tumor Tissue) | 0 | 8 | | 7.57 |
| | | 16, 17 (Colon Tumor Tissue vs. Colon Metastasis) | 8 | 0 | 8.12 | |
| 980 | 456747 | 15, 17 (Normal Colon Tissue vs. Colon Metastasis) | 6 | 0 | 6.44 | |
| 981 | 562550 | 16, 17 (Colon Tumor Tissue vs. Colon Metastasis) | 0 | 6 | | 5.91 |
| 982 | 549722 | 16, 17 (Colon Tumor Tissue vs. Colon Metastasis) | 0 | 6 | | 5.91 |
| 983 | 640525 | 15, 17 (Normal Colon Tissue vs. Colon Metastasis) | 7 | 0 | 7.51 | |
| | | 15, 16 (Normal Colon vs. Colon Tumor Tissue) | 7 | 0 | 7.4 | |
| 984 | 455542 | 15, 16 (Normal Colon vs. Colon Tumor Tissue) | 0 | 6 | | 5.68 |
| 985 | 9436 | 16, 17 (Colon Tumor Tissue vs. Colon Metastasis) | 4 | 15 | | 3.69 |
| 986 | 380284 | 15, 16 (Normal Colon vs. Colon Tumor Tissue) | 9 | 0 | 9.51 | |
| | | 15, 17 (Normal Colon Tissue vs. Colon Metastasis) | 9 | 1 | 9.66 | |
| 987 | 556260 | 16, 17 (Colon Tumor Tissue vs. Colon Metastasis) | 0 | 6 | | 5.91 |
| 988 | 650476 | 15, 17 (Normal Colon Tissue vs. Colon Metastasis) | 7 | 0 | 7.51 | |
| 989 | 554500 | 15, 16 (Normal Colon vs. Colon Tumor Tissue) | 6 | 0 | 6.34 | |
| 990 | 422375 | 15, 17 (Normal Colon Tissue vs. Colon Metastasis) | 2 | 11 | | 5.12 |
| 991 | 456528 | 15, 16 (Normal Colon vs. Colon Tumor Tissue) | 0 | 7 | | 6.62 |
| 992 | 644190 | 16, 17 (Colon Tumor Tissue vs. Colon Metastasis) | 6 | 0 | 6.09 | |
| 993 | 554080 | 16, 17 (Colon Tumor Tissue vs. Colon Metastasis) | 1 | 9 | | 8.86 |
| 994 | 546705 | 16, 17 (Colon Tumor Tissue vs. Colon Metastasis) | 0 | 6 | | 5.91 |
| 995 | 558337 | 16, 17 (Colon Tumor Tissue vs. Colon Metastasis) | 0 | 6 | | 5.91 |
| 996 | 449269 | 15, 17 (Normal Colon Tissue vs. Colon Metastasis) | 26 | 7 | 3.99 | |
| | | 15, 16 (Normal Colon vs. Colon Tumor Tissue) | 26 | 5 | 5.5 | |
| 997 | 645799 | 16, 17 (Colon Tumor Tissue vs. Colon Metastasis) | 7 | 0 | 7.11 | |
| 998 | 456506 | 15, 17 (Normal Colon Tissue vs. Colon Metastasis) | 17 | 7 | 2.61 | |
| 999 | 218416 | 16, 17 (Colon Tumor Tissue vs. Colon Metastasis) | 0 | 6 | | 5.91 |
| 1000 | 455820 | 16, 17 (Colon Tumor Tissue vs. Colon Metastasis) | 0 | 7 | | 6.89 |
| 1001 | 554703 | 16, 17 (Colon Tumor Tissue vs. Colon Metastasis) | 1 | 9 | | 8.86 |
| | | 15, 17 (Normal Colon Tissue vs. Colon Metastasis) | 0 | 9 | | 8.38 |
| 1002 | 650204 | 15, 17 (Normal Colon Tissue vs. Colon Metastasis) | 11 | 0 | 11.81 | |
| 1003 | 456808 | 15, 16 (Normal Colon vs. Colon Tumor Tissue) | 7 | 42 | | 5.68 |
| | | 16, 17 (Colon Tumor Tissue vs. Colon Metastasis) | 42 | 1 | 42.65 | |
| 1004 | 420686 | 16, 17 (Colon Tumor Tissue vs. Colon Metastasis) | 0 | 8 | | 7.88 |
| 1005 | 378373 | 16, 17 (Colon Tumor Tissue vs. Colon Metastasis) | 0 | 7 | | 6.89 |
| | | 15, 17 (Normal Colon Tissue vs. Colon Metastasis) | 0 | 7 | | 6.52 |
| 1006 | 463824 | 15, 17 (Normal Colon Tissue vs. Colon Metastasis) | 6 | 0 | 6.44 | |
| | | 15, 16 (Normal Colon vs. Colon Tumor Tissue) | 6 | 0 | 6.34 | |
| 1007 | 24939 | 15, 16 (Normal Colon vs. Colon Tumor Tissue) | 0 | 8 | | 7.57 |
| 1008 | 556561 | 16, 17 (Colon Tumor Tissue vs. Colon Metastasis) | 1 | 10 | | 9.85 |
| | | 15, 17 (Normal Colon Tissue vs. Colon Metastasis) | 0 | 10 | | 9.32 |
| 1009 | 380406 | 16, 17 (Colon Tumor Tissue vs. Colon Metastasis) | 3 | 12 | | 3.94 |
| | | 15, 16 (Normal Colon vs. Colon Tumor Tissue) | 16 | 3 | 5.64 | |
| 1010 | 456764 | 15, 17 (Normal Colon Tissue vs. Colon Metastasis) | 14 | 1 | 15.03 | |
| | | 16, 17 (Colon Tumor Tissue vs. Colon Metastasis) | 10 | 1 | 10.16 | |
| 1011 | 725703 | 15, 16 (Normal Colon vs. Colon Tumor Tissue) | 0 | 9 | | 8.51 |
| | | 16, 17 (Colon Tumor Tissue vs. Colon Metastasis) | 9 | 0 | 9.14 | |
| 1012 | 185465 | 03, 04 (Breast, High Met vs. Breast, Non-Met) | 2 | 14 | | 7.17 |
| | | 16, 17 (Colon Tumor Tissue vs. Colon Metastasis) | 4 | 14 | | 3.45 |
| | | 23, 24 (Normal Lung Tissue vs. Lung Tumor Tissue) | 25 | 9 | 2.81 | |
| 1013 | 5830 | 15, 16 (Normal Colon vs. Colon Tumor Tissue) | 0 | 7 | | 6.62 |
| | | 16, 17 (Colon Tumor Tissue vs. Colon Metastasis) | 7 | 0 | 7.11 | |
| 1014 | 539955 | 16, 17 (Colon Tumor Tissue vs. Colon Metastasis) | 24 | 0 | 24.37 | |
| | | 15, 17 (Normal Colon Tissue vs. Colon Metastasis) | 11 | 0 | 11.81 | |
| | | 23, 24 (Normal Lung Tissue vs. Lung Tumor Tissue) | 3 | 47 | | 15.51 |
| 1015 | 640747 | 15, 17 (Normal Colon Tissue vs. Colon Metastasis) | 6 | 0 | 6.44 | |
| 1016 | 500630 | 16, 17 (Colon Tumor Tissue vs. Colon Metastasis) | 6 | 0 | 6.09 | |
| 1017 | 448511 | 16, 17 (Colon Tumor Tissue vs. Colon Metastasis) | 4 | 26 | | 6.4 |
| | | 15, 17 (Normal Colon Tissue vs. Colon Metastasis) | 3 | 26 | | 8.07 |
| 1018 | 405073 | 15, 17 (Normal Colon Tissue vs. Colon Metastasis) | 6 | 0 | 6.44 | |
| | | 15, 16 (Normal Colon vs. Colon Tumor Tissue) | 6 | 0 | 6.34 | |
| 1019 | 641439 | 15, 16 (Normal Colon vs. Colon Tumor Tissue) | 6 | 0 | 6.34 | |
| | | 15, 17 (Normal Colon Tissue vs. Colon Metastasis) | 6 | 0 | 6.44 | |
| 1020 | 406092 | 15, 17 (Normal Colon Tissue vs. Colon Metastasis) | 12 | 3 | 4.29 | |
| 1021 | 559806 | 16, 17 (Colon Tumor Tissue vs. Colon Metastasis) | 0 | 6 | | 5.91 |
| 1022 | 380284 | 15, 16 (Normal Colon vs. Colon Tumor Tissue) | 9 | 0 | 9.51 | |
| | | 15, 17 (Normal Colon Tissue vs. Colon Metastasis) | 9 | 1 | 9.66 | |
| 1023 | 560700 | 16, 17 (Colon Tumor Tissue vs. Colon Metastasis) | 0 | 6 | | 5.91 |
| 1024 | 552879 | 16, 17 (Colon Tumor Tissue vs. Colon Metastasis) | 2 | 14 | | 6.89 |
| | | 15, 16 (Normal Colon vs. Colon Tumor Tissue) | 11 | 2 | 5.81 | |
| 1025 | 640590 | 15, 17 (Normal Colon Tissue vs. Colon Metastasis) | 9 | 0 | 9.66 | |
| | | 15, 16 (Normal Colon vs. Colon Tumor Tissue) | 9 | 1 | 9.51 | |
| 1026 | 641683 | 15, 16 (Normal Colon vs. Colon Tumor Tissue) | 8 | 0 | 8.46 | |
| | | 15, 17 (Normal Colon Tissue vs. Colon Metastasis) | 8 | 0 | 8.59 | |
| 1027 | 648934 | 15, 16 (Normal Colon vs. Colon Tumor Tissue) | 8 | 0 | 8.46 | |
| | | 15, 17 (Normal Colon Tissue vs. Colon Metastasis) | 8 | 0 | 8.59 | |
| 1028 | 557948 | 16, 17 (Colon Tumor Tissue vs. Colon Metastasis) | 0 | 11 | | 10.83 |
| 1029 | 377094 | 15, 16 (Normal Colon vs. Colon Tumor Tissue) | 10 | 2 | 5.28 | |
| 1030 | 449617 | 16, 17 (Colon Tumor Tissue vs. Colon Metastasis) | 7 | 18 | | 2.53 |
| 1031 | 978 | 15, 17 (Normal Colon Tissue vs. Colon Metastasis) | 67 | 20 | 3.6 | |
| | | 15, 16 (Normal Colon vs. Colon Tumor Tissue) | 67 | 28 | 2.53 | |
| | | 03, 04 (Breast, High Met vs. Breast, Non-Met) | 78 | 23 | 3.31 | |
| 1032 | 607430 | 15, 16 (Normal Colon vs. Colon Tumor Tissue) | 6 | 0 | 6.34 | |
| 1033 | 641837 | 15, 17 (Normal Colon Tissue vs. Colon Metastasis) | 16 | 0 | 17.17 | |
| | | 16, 17 (Colon Tumor Tissue vs. Colon Metastasis) | 31 | 0 | 31.48 | |
| 1034 | 449750 | 16, 17 (Colon Tumor Tissue vs. Colon Metastasis) | 1 | 28 | | 27.57 |
| | | 15, 17 (Normal Colon Tissue vs. Colon Metastasis) | 4 | 28 | | 6.52 |
| 1035 | 646780 | 15, 17 (Normal Colon Tissue vs. Colon Metastasis) | 10 | 0 | 10.73 | |
| | | 16, 17 (Colon Tumor Tissue vs. Colon Metastasis) | 7 | 0 | 7.11 | |
| 1036 | 546642 | 16, 17 (Colon Tumor Tissue vs. Colon Metastasis) | 11 | 0 | 11.17 | |
| 1037 | 642906 | 16, 17 (Colon Tumor Tissue vs. Colon Metastasis) | 7 | 0 | 7.11 | |
| 1038 | 552879 | 16, 17 (Colon Tumor Tissue vs. Colon Metastasis) | 2 | 14 | | 6.89 |
| | | 15, 16 (Normal Colon vs. Colon Tumor Tissue) | 11 | 2 | 5.81 | |
| 1039 | 644205 | 15, 17 (Normal Colon Tissue vs. Colon Metastasis) | 7 | 0 | 7.51 | |
| | | 15, 16 (Normal Colon vs. Colon Tumor Tissue) | 7 | 0 | 7.4 | |
| 1040 | 506744 | 16, 17 (Colon Tumor Tissue vs. Colon Metastasis) | 0 | 8 | | 7.88 |
| | | 15, 16 (Normal Colon vs. Colon Tumor Tissue) | 7 | 0 | 7.4 | |
| 1041 | 557797 | 16, 17 (Colon Tumor Tissue vs. Colon Metastasis) | 3 | 16 | | 5.25 |
| 1042 | 640356 | 15, 17 (Normal Colon Tissue vs. Colon Metastasis) | 10 | 0 | 10.73 | |
| 1043 | 462659 | 15, 16 (Normal Colon vs. Colon Tumor Tissue) | 7 | 0 | 7.4 | |
| | | 15, 17 (Normal Colon Tissue vs. Colon Metastasis) | 7 | 0 | 7.51 | |
| 1044 | 645633 | 15, 17 (Normal Colon Tissue vs. Colon Metastasis) | 7 | 0 | 7.51 | |
| 1045 | 237288 | 15, 17 (Normal Colon Tissue vs. Colon Metastasis) | 7 | 0 | 7.51 | |
| | | 15, 16 (Normal Colon vs. Colon Tumor Tissue) | 7 | 0 | 7.4 | |
| 1046 | 454343 | 16, 17 (Colon Tumor Tissue vs. Colon Metastasis) | 10 | 0 | 10.16 | |
| 1047 | 386543 | 16, 17 (Colon Tumor Tissue vs. Colon Metastasis) | 3 | 23 | | 7.55 |
| | | 15, 17 (Normal Colon Tissue vs. Colon Metastasis) | 3 | 23 | | 7.14 |
| 1048 | 446404 | 18, 20 (Normal Colon Tissue vs. Colon Metastasis) | 23 | 0 | 19.66 | |
| | | 15, 17 (Normal Colon Tissue vs. Colon Metastasis) | 73 | 0 | 78.36 | |
| | | 18, 19 (Normal Colon Tissue vs. Colon Tumor) | 23 | 0 | 26.28 | |
| | | 15, 16 (Normal Colon vs. Colon Tumor Tissue) | 73 | 1 | 77.16 | |
| 1049 | 456528 | 15, 16 (Normal Colon vs. Colon Tumor Tissue) | 0 | 7 | | 6.62 |
| 1050 | 456528 | 15, 16 (Normal Colon vs. Colon Tumor Tissue) | 0 | 7 | | 6.62 |
| 1051 | 452781 | 15, 17 (Normal Colon Tissue vs. Colon Metastasis) | 2 | 11 | | 5.12 |
| 1052 | 551671 | 16, 17 (Colon Tumor Tissue vs. Colon Metastasis) | 0 | 7 | | 6.89 |
| | | 15, 17 (Normal Colon Tissue vs. Colon Metastasis) | 0 | 7 | | 6.52 |
| 1053 | 644242 | 15, 16 (Normal Colon vs. Colon Tumor Tissue) | 6 | 0 | 6.34 | |
| | | 15, 17 (Normal Colon Tissue vs. Colon Metastasis) | 6 | 0 | 6.44 | |
| 1054 | 561892 | 15, 17 (Normal Colon Tissue vs. Colon Metastasis) | 0 | 7 | | 6.52 |
| 1055 | 450429 | 16, 17 (Colon Tumor Tissue vs. Colon Metastasis) | 10 | 1 | 10.16 | |
| | | 15, 17 (Normal Colon Tissue vs. Colon Metastasis) | 13 | 1 | 13.95 | |
| 1056 | 533588 | 15, 17 (Normal Colon Tissue vs. Colon Metastasis) | 7 | 0 | 7.51 | |
| 1057 | 553877 | 16, 17 (Colon Tumor Tissue vs. Colon Metastasis) | 1 | 8 | | 7.88 |
| 1058 | 650195 | 15, 16 (Normal Colon vs. Colon Tumor Tissue) | 6 | 0 | 6.34 | |
| | | 15, 17 (Normal Colon Tissue vs. Colon Metastasis) | 6 | 0 | 6.44 | |
| 1059 | 193486 | 15, 17 (Normal Colon Tissue vs. Colon Metastasis) | 0 | 7 | | 6.52 |
| 1060 | 650195 | 15, 17 (Normal Colon Tissue vs. Colon Metastasis) | 6 | 0 | 6.44 | |
| | | 15, 16 (Normal Colon vs. Colon Tumor Tissue) | 6 | 0 | 6.34 | |
| 1061 | 562835 | 15, 17 (Normal Colon Tissue vs. Colon Metastasis) | 0 | 9 | | 8.38 |
| 1062 | 736816 | 16, 17 (Colon Tumor Tissue vs. Colon Metastasis) | 9 | 0 | 9.14 | |
| | | 15, 16 (Normal Colon vs. Colon Tumor Tissue) | 0 | 9 | | 8.51 |
| 1063 | 403632 | 15, 17 (Normal Colon Tissue vs. Colon Metastasis) | 2 | 11 | | 5.12 |
| 1064 | 390124 | 18, 19 (Normal Colon Tissue vs. Colon Tumor) | 0 | 8 | | 7 |
| | | 15, 17 (Normal Colon Tissue vs. Colon Metastasis) | 6 | 18 | | 2.79 |
| | | 19, 20 (Colon Tumor Tissue vs. Colon Metastasis) | 8 | 0 | 5.98 | |
| 1065 | 390124 | 18, 19 (Normal Colon Tissue vs. Colon Tumor) | 0 | 8 | | 7 |
| | | 19, 20 (Colon Tumor Tissue vs. Colon Metastasis) | 8 | 0 | 5.98 | |
| | | 15, 17 (Normal Colon Tissue vs. Colon Metastasis) | 6 | 18 | | 2.79 |
| 1066 | 422687 | 15, 16 (Normal Colon vs. Colon Tumor Tissue) | 0 | 10 | | 9.46 |
| | | 16, 17 (Colon Tumor Tissue vs. Colon Metastasis) | 10 | 0 | 10.16 | |
| 1067 | 394413 | 18, 19 (Normal Colon Tissue vs. Colon Tumor) | 21 | 2 | 12 | |
| | | 15, 16 (Normal Colon vs. Colon Tumor Tissue) | 113 | 3 | 39.81 | |
| | | 15, 17 (Normal Colon Tissue vs. Colon Metastasis) | 113 | 0 | 121.29 | |
| | | 18, 20 (Normal Colon Tissue vs. Colon Metastasis) | 21 | 0 | 17.95 | |
| 1068 | 549178 | 16, 17 (Colon Tumor Tissue vs. Colon Metastasis) | 0 | 10 | | 9.85 |
| | | 15, 17 (Normal Colon Tissue vs. Colon Metastasis) | 1 | 10 | | 9.32 |
| 1069 | 453079 | 16, 17 (Colon Tumor Tissue vs. Colon Metastasis) | 8 | 1 | 8.12 | |
| 1070 | 463824 | 15, 16 (Normal Colon vs. Colon Tumor Tissue) | 6 | 0 | 6.34 | |
| | | 15, 17(Normal Colon Tissue vs. Colon Metastasis) | 6 | 0 | 6.44 | |
| 1071 | 736595 | 15, 16 (Normal Colon vs. Colon Tumor Tissue) | 0 | 6 | | 5.68 |
| | | 16, 17 (Colon Tumor Tissue vs. Colon Metastasis) | 6 | 0 | 6.09 | |
| 1072 | 102655 | 03, 04 (Breast, High Met vs. Breast, Non-Met) | 4 | 33 | | 8.46 |
| | | 15, 17 (Normal Colon Tissue vs. Colon Metastasis) | 14 | 0 | 15.03 | |
| | | 15, 16 (Normal Colon vs. Colon Tumor Tissue) | 14 | 0 | 14.8 | |
| 1073 | 448606 | 15, 17 (Normal Colon Tissue vs. Colon Metastasis) | 3 | 20 | | 6.21 |
| 1074 | 504513 | 15, 17 (Normal Colon Tissue vs. Colon Metastasis) | 6 | 0 | 6.44 | |
| 1075 | 20036 | 15, 17 (Normal Colon Tissue vs. Colon Metastasis) | 1 | 13 | | 12.11 |
| 1076 | 530883 | 15, 16 (Normal Colon vs. Colon Tumor Tissue) | 0 | 7 | | 6.62 |
| 1077 | 447126 | 15, 16 (Normal Colon vs. Colon Tumor Tissue) | 19 | 5 | 4.02 | |
| | | 16, 17 (Colon Tumor Tissue vs. Colon Metastasis) | 5 | 20 | | 3.94 |
| 1078 | 556561 | 15, 17 (Normal Colon Tissue vs. Colon Metastasis) | 0 | 10 | | 9.32 |
| | | 16, 17 (Colon Tumor Tissue vs. Colon Metastasis) | 1 | 10 | | 9.85 |
| 1079 | 455096 | 16, 17 (Colon Tumor Tissue vs. Colon Metastasis) | 2 | 10 | | 4.92 |
| | | 15, 17 (Normal Colon Tissue vs. Colon Metastasis) | 1 | 10 | | 9.32 |
| 1080 | 549320 | 15, 17 (Normal Colon Tissue vs. Colon Metastasis) | 0 | 7 | | 6.52 |
| 1081 | 560984 | 16, 17 (Colon Tumor Tissue vs. Colon Metastasis) | 0 | 6 | | 5.91 |
| 1082 | 450791 | 15, 16 (Normal Colon vs. Colon Tumor Tissue) | 18 | 6 | 3.17 | |
| | | 15, 17 (Normal Colon Tissue vs. Colon Metastasis) | 18 | 3 | 6.44 | |
| 1083 | 16556 | 15, 16 (Normal Colon vs. Colon Tumor Tissue) | 12 | 3 | 4.23 | |
| 1084 | 402707 | 15, 17 (Normal Colon Tissue vs. Colon Metastasis) | 1 | 9 | | 8.38 |
| 1085 | 557903 | 15, 16 (Normal Colon vs. Colon Tumor Tissue) | 0 | 9 | | 8.51 |
| 1086 | 451243 | 15, 17 (Normal Colon Tissue vs. Colon Metastasis) | 0 | 7 | | 6.52 |
| | | 15, 16 (Normal Colon vs. Colon Tumor Tissue) | 0 | 6 | | 5.68 |
| 1087 | 452506 | 15, 16 (Normal Colon vs. Colon Tumor Tissue) | 7 | 0 | 7.4 | |
| | | 16, 17 (Colon Tumor Tissue vs. Colon Metastasis) | 0 | 6 | | 5.91 |
| 1088 | 554703 | 15, 17 (Normal Colon Tissue vs. Colon Metastasis) | 0 | 9 | | 8.38 |
| | | 16, 17 (Colon Tumor Tissue vs. Colon Metastasis) | 1 | 9 | | 8.86 |
| 1089 | 449580 | 15, 16 (Normal Colon vs. Colon Tumor Tissue) | 16 | 4 | 4.23 | |
| 1090 | 3316 | 16, 17 (Colon Tumor Tissue vs. Colon Metastasis) | 0 | 6 | | 5.91 |
| 1091 | 97507 | 15, 16 (Normal Colon vs. Colon Tumor Tissue) | 1 | 9 | | 8.51 |
| 1092 | 556216 | 16, 17 (Colon Tumor Tissue vs. Colon Metastasis) | 0 | 7 | | 6.89 |
| | | 15, 17 (Normal Colon Tissue vs. Colon Metastasis) | 0 | 7 | | 6.52 |
| 1093 | 185401 | 03, 04 (Breast, High Met vs. Breast, Non-Met) | 0 | 63 | | 64.57 |
| 1094 | 3758 | 03, 04 (Breast, High Met vs. Breast, Non-Met) | 17 | 5 | 3.32 | |
| 1095 | 95700 | 03, 04 (Breast, High Met vs. Breast, Non-Met) | 1 | 21 | | 21.52 |
| 1096 | 2478 | 03, 04 (Breast, High Met vs. Breast, Non-Met) | 17 | 5 | 3.32 | |
| 1097 | 550267 | 15, 17 (Normal Colon Tissue vs. Colon Metastasis) | 15 | 4 | 4.03 | |
| | | 15, 16 (Normal Colon vs. Colon Tumor Tissue) | 15 | 1 | 15.85 | |
| 1098 | 185652 | 03, 04 (Breast, High Met vs. Breast, Non-Met) | 0 | 7 | | 7.17 |
| 1099 | 55798 | 03, 04 (Breast, High Met vs. Breast, Non-Met) | 0 | 9 | | 9.22 |
| 1100 | 5078 | 15, 16 (Normal Colon vs. Colon Tumor Tissue) | 0 | 6 | | 5.68 |
| 1101 | 9784 | 03, 04 (Breast, High Met vs. Breast, Non-Met) | 0 | 6 | | 6.15 |
| 1102 | 2245 | 03, 04 (Breast, High Met vs. Breast, Non-Met) | 13 | 1 | 12.68 | |
| | | 01, 02 (Colon, High Met vs. Colon, Low Met) | 12 | 27 | | 2.44 |
| 1103 | 11606 | 03, 04 (Breast, High Met vs. Breast, Non-Met) | 6 | 0 | 5.85 | |
| 1104 | 2245 | 03, 04 (Breast, High Met vs. Breast, Non-Met) | 13 | 1 | 12.68 | |
| | | 01, 02 (Colon, High Met vs. Colon, Low Met) | 12 | 27 | | 2.44 |
| 1105 | 551172 | 15, 16 (Normal Colon vs. Colon Tumor Tissue) | 1 | 10 | | 9.46 |
| 1106 | 729175 | 15, 16 (Normal Colon vs. Colon Tumor Tissue) | 0 | 6 | | 5.68 |
| | | 16, 17 (Colon Tumor Tissue vs. Colon Metastasis) | 6 | 0 | 6.09 | |
| 1107 | 6317 | 01, 02 (Colon, High Met vs. Colon, Low Met) | 0 | 6 | | 6.5 |
| 1108 | 2478 | 03, 04 (Breast, High Met vs. Breast, Non-Met) | 17 | 5 | 3.32 | |
| 1109 | 4727 | 03, 04 (Breast, High Met vs. Breast, Non-Met) | 19 | 0 | 18.54 | |
| 1110 | 185598 | 03, 04 (Breast, High Met vs. Breast, Non-Met) | 0 | 8 | | 8.2 |
| 1111 | 736349 | 15, 16 (Normal Colon vs. Colon Tumor Tissue) | 0 | 6 | | 5.68 |
| | | 16, 17 (Colon Tumor Tissue vs. Colon Metastasis) | 6 | 0 | 6.09 | |
| 1113 | 189561 | 15, 16 (Normal Colon vs. Colon Tumor Tissue) | 0 | 9 | | 8.51 |
| | | 08, 09 (Lung, High Met vs. Lung, Low Met) | 1 | 14 | | 10.02 |
| | | 15, 17 (Normal Colon Tissue vs. Colon Metastasis) | 0 | 9 | | 8.38 |
| 1114 | 728131 | 16, 17 (Colon Tumor Tissue vs. Colon Metastasis) | 6 | 0 | 6.09 | |
| | | 15, 16 (Normal Colon vs. Colon Tumor Tissue) | 0 | 6 | | 5.68 |
| 1115 | 560984 | 16, 17 (Colon Tumor Tissue vs. Colon Metastasis) | 0 | 6 | | 5.91 |
| 1116 | 549945 | 15, 17 (Normal Colon Tissue vs. Colon Metastasis) | 12 | 2 | 6.44 | |
| | | 15, 16 (Normal Colon vs. Colon Tumor Tissue) | 12 | 2 | 6.34 | |
| 1117 | 554785 | 16, 17 (Colon Tumor Tissue vs. Colon Metastasis) | 0 | 8 | | 7.88 |
| | | 15, 17 (Normal Colon Tissue vs. Colon Metastasis) | 0 | 8 | | 7.45 |
| 1118 | 554785 | 15, 17 (Normal Colon Tissue vs. Colon Metastasis) | 0 | 8 | | 7.45 |
| | | 16, 17 (Colon Tumor Tissue vs. Colon Metastasis) | 0 | 8 | | 7.88 |
| 1119 | 551235 | 16, 17 (Colon Tumor Tissue vs. Colon Metastasis) | 0 | 7 | | 6.89 |
| 1120 | 2634 | 03, 04 (Breast, High Met vs. Breast, Non-Met) | 48 | 0 | 46.83 | |
| 1121 | 548858 | 16, 17 (Colon Tumor Tissue vs. Colon Metastasis) | 0 | 11 | | 10.83 |
| 1122 | 15625 | 15, 17 (Normal Colon Tissue vs. Colon Metastasis) | 17 | 0 | 18.25 | |
| | | 15, 16 (Normal Colon vs. Colon Tumor Tissue) | 17 | 1 | 17.97 | |
| 1123 | 649259 | 15, 17 (Normal Colon Tissue vs. Colon Metastasis) | 7 | 0 | 7.51 | |
| | | 15, 16 (Normal Colon vs. Colon Tumor Tissue) | 7 | 0 | 7.4 | |
| 1124 | 550267 | 15, 16 (Normal Colon vs. Colon Tumor Tissue) | 15 | 1 | 15.85 | |
| | | 15, 17 (Normal Colon Tissue vs. Colon Metastasis) | 15 | 4 | 4.03 | |
| 1125 | 7436 | 03, 04 (Breast, High Met vs. Breast, Non-Met) | 9 | 1 | 8.78 | |
| 1126 | 451794 | 15, 16 (Normal Colon vs. Colon Tumor Tissue) | 15 | 0 | 15.85 | |
| | | 15, 17 (Normal Colon Tissue vs. Colon Metastasis) | 15 | 1 | 16.1 | |
| 1127 | 5744 | 01, 02 (Colon, High Met vs. Colon, Low Met) | 0 | 6 | | 6.5 |
| 1128 | 3516 | 01, 02 (Colon, High Met vs. Colon, Low Met) | 5 | 17 | | 3.69 |
| 1129 | 730555 | 16, 17 (Colon Tumor Tissue vs. Colon Metastasis) | 6 | 0 | 6.09 | |
| | | 15, 16 (Normal Colon vs. Colon Tumor Tissue) | 0 | 6 | | 5.68 |
| 1130 | 3085 | 03, 04 (Breast, High Met vs. Breast, Non-Met) | 2 | 11 | | 5.64 |
| 1131 | 638854 | 15, 16 (Normal Colon vs. Colon Tumor Tissue) | 32 | 11 | 3.07 | |
| | | 15, 17 (Normal Colon Tissue vs. Colon Metastasis) | 32 | 0 | 34.35 | |
| | | 16, 17 (Colon Tumor Tissue vs. Colon Metastasis) | 11 | 0 | 11.17 | |
| 1132 | 7379 | 01, 02 (Colon, High Met vs. Colon, Low Met) | 0 | 6 | | 6.5 |
| 1133 | 185562 | 03, 04 (Breast, High Met vs. Breast, Non-Met) | 0 | 9 | | 9.22 |
| 1134 | 452491 | 15, 16 (Normal Colon vs. Colon Tumor Tissue) | 12 | 3 | 4.23 | |
| 1135 | 646248 | 16, 17 (Colon Tumor Tissue vs. Colon Metastasis) | 6 | 0 | 6.09 | |
| 1136 | 6056 | 03, 04 (Breast, High Met vs. Breast, Non-Met) | 7 | 0 | 6.83 | |
| 1137 | 643103 | 15, 16 (Normal Colon vs. Colon Tumor Tissue) | 7 | 0 | 7.4 | |
| | | 15, 17 (Normal Colon Tissue vs. Colon Metastasis) | 7 | 0 | 7.51 | |
| 1138 | 6923 | 03, 04 (Breast, High Met vs. Breast, Non-Met) | 6 | 0 | 5.85 | |
| 1139 | 6923 | 03, 04 (Breast, High Met vs. Breast, Non-Met) | 6 | 0 | 5.85 | |
| 1140 | 901 | 03, 04 (Breast, High Met vs. Breast, Non-Met) | 56 | 5 | 10.93 | |
| 1141 | 901 | 03, 04 (Breast, High Met vs. Breast, Non-Met) | 56 | 5 | 10.93 | |
| 1142 | 367 | 08, 09 (Lung, High Met vs. Lung, Low Met) | 30 | 99 | | 2.36 |
| | | 15, 16 (Normal Colon vs. Colon Tumor Tissue) | 13 | 4 | 3.44 | |
| | | 03, 04 (Breast, High Met vs. Breast, Non-Met) | 105 | 24 | 4.27 | |
| | | 01, 02 (Colon, High Met vs. Colon, Low Met) | 19 | 97 | | 5.53 |
| 1143 | 4043 | 01, 02 (Colon, High Met vs. Colon, Low Met) | 1 | 9 | | 9.76 |
| 1144 | 3299 | 08, 09 (Lung, High Met vs. Lung, Low Met) | 10 | 1 | 13.97 | |
| | | 03, 04 (Breast, High Met vs. Breast, Non-Met) | 20 | 3 | 6.5 | |
| 1145 | 11881 | 03, 04 (Breast, High Met vs. Breast, Non-Met) | 6 | 0 | 5.85 | |
| 1146 | 9113 | 01, 02 (Colon, High Met vs. Colon, Low Met) | 0 | 7 | | 7.59 |
| 1147 | 185460 | 03, 04 (Breast, High Met vs. Breast, Non-Met) | 0 | 16 | | 16.4 |
| 1148 | 185716 | 03, 04 (Breast, High Met vs. Breast, Non-Met) | 0 | 6 | | 6.15 |
| 1149 | 5753 | 01, 02 (Colon, High Met vs. Colon, Low Met) | 0 | 10 | | 10.84 |
| 1150 | 24939 | 15, 16 (Normal Colon vs. Colon Tumor Tissue) | 0 | 8 | | 7.57 |
| 1151 | 649684 | 15, 17 (Normal Colon Tissue vs. Colon Metastasis) | 10 | 0 | 10.73 | |
| 1152 | 642109 | 15, 17 (Normal Colon Tissue vs. Colon Metastasis) | 6 | 0 | 6.44 | |
| 1153 | 15035 | 15, 16 (Normal Colon vs. Colon Tumor Tissue) | 8 | 0 | 8.46 | |
| | | 15, 17 (Normal Colon Tissue vs. Colon Metastasis) | 8 | 1 | 8.59 | |
| 1154 | 649354 | 15, 16 (Normal Colon vs. Colon Tumor Tissue) | 6 | 0 | 6.34 | |
| | | 15, 17 (Normal Colon Tissue vs. Colon Metastasis) | 6 | 0 | 6.44 | |
| 1155 | 4465 | 01, 02 (Colon, High Met vs. Colon, Low Met) | 4 | 14 | | 3.79 |
| 1156 | 647952 | 15, 17 (Normal Colon Tissue vs. Colon Metastasis) | 6 | 0 | 6.44 | |
| | | 15, 16 (Normal Colon vs. Colon Tumor Tissue) | 6 | 0 | 6.34 | |
| 1157 | 455601 | 16, 17 (Colon Tumor Tissue vs. Colon Metastasis) | 8 | 0 | 8.12 | |
| | | 15, 17 (Normal Colon Tissue vs. Colon Metastasis) | 10 | 0 | 10.73 | |
| 1158 | 641901 | 15, 17 (Normal Colon Tissue vs. Colon Metastasis) | 6 | 0 | 6.44 | |
| 1159 | 446878 | 16, 17 (Colon Tumor Tissue vs. Colon Metastasis) | 1 | 12 | | 11.82 |
| 1160 | 7436 | 03, 04 (Breast, High Met vs. Breast, Non-Met) | 9 | 1 | 8.78 | |
| 1161 | 2245 | 01, 02 (Colon, High Met vs. Colon, Low Met) | 12 | 27 | | 2.44 |
| | | 03, 04 (Breast, High Met vs. Breast, Non-Met) | 13 | 1 | 12.68 | |
| 1162 | 3531 | 01, 02 (Colon, High Met vs. Colon, Low Met) | 3 | 17 | | 6.14 |
| 1163 | 9625 | 03, 04 (Breast, High Met vs. Breast, Non-Met) | 1 | 12 | | 12.3 |
| 1164 | 727489 | 16, 17 (Colon Tumor Tissue vs. Colon Metastasis) | 9 | 0 | 9.14 | |
| | | 15, 16 (Normal Colon vs. Colon Tumor Tissue) | 0 | 9 | | 8.51 |
| 1165 | 159925 | 03, 04 (Breast, High Met vs. Breast, Non-Met) | 1 | 22 | | 22.55 |
| 1166 | 645210 | 15, 16 (Normal Colon vs. Colon Tumor Tissue) | 10 | 1 | 10.57 | |
| | | 15, 17 (Normal Colon Tissue vs. Colon Metastasis) | 10 | 0 | 10.73 | |
| 1167 | 157629 | 03, 04 (Breast, High Met vs. Breast, Non-Met) | 3 | 18 | | 6.15 |
| 1168 | 8375 | 03, 04 (Breast, High Met vs. Breast, Non-Met) | 7 | 0 | 6.83 | |
| 1169 | 4319 | 03, 04 (Breast, High Met vs. Breast, Non-Met) | 14 | 0 | 13.66 | |
| | | 01, 02 (Colon, High Met vs. Colon, Low Met) | 0 | 6 | | 6.5 |
| 1170 | 4045 | 01, 02 (Colon, High Met vs. Colon, Low Met) | 2 | 11 | | 5.96 |
| | | 03, 04 (Breast, High Met vs. Breast, Non-Met) | 10 | 1 | 9.76 | |
| 1171 | 185642 | 03, 04 (Breast, High Met vs. Breast, Non-Met) | 0 | 7 | | 7.17 |
| 1172 | 7436 | 03, 04 (Breast, High Met vs. Breast, Non-Met) | 9 | 1 | 8.78 | |
| 1173 | 3531 | 01, 02 (Colon, High Met vs. Colon, Low Met) | 3 | 17 | | 6.14 |
| 1174 | 644776 | 16, 17 (Colon Tumor Tissue vs. Colon Metastasis) | 9 | 0 | 9.14 | |
| 1175 | 8354 | 03, 04 (Breast, High Met vs. Breast, Non-Met) | 7 | 0 | 6.83 | |
| 1176 | 2099 | 03, 04 (Breast, High Met vs. Breast, Non-Met) | 27 | 7 | 3.76 | |
| 1177 | 449956 | 16, 17 (Colon Tumor Tissue vs. Colon Metastasis) | 10 | 1 | 10.16 | |
| 1178 | 649106 | 15, 17 (Normal Colon Tissue vs. Colon Metastasis) | 7 | 0 | 7.51 | |
| 1179 | 452414 | 15, 16 (Normal Colon vs. Colon Tumor Tissue) | 17 | 0 | 17.97 | |
| | | 15, 17 (Normal Colon Tissue vs. Colon Metastasis) | 17 | 0 | 18.25 | |
| 1180 | 732712 | 16, 17 (Colon Tumor Tissue vs. Colon Metastasis) | 7 | 0 | 7.11 | |
| | | 15, 16 (Normal Colon vs. Colon Tumor Tissue) | 0 | 7 | | 6.62 |
| 1181 | 185562 | 03, 04 (Breast, High Met vs. Breast, Non-Met) | 0 | 9 | | 9.22 |
| 1182 | 3516 | 01, 02 (Colon, High Met vs. Colon, Low Met) | 5 | 17 | | 3.69 |
| 1183 | 185562 | 03, 04 (Breast, High Met vs. Breast, Non-Met) | 0 | 9 | | 9.22 |
| 1184 | 185460 | 03, 04 (Breast, High Met vs. Breast, Non-Met) | 0 | 16 | | 16.4 |
| 1185 | 10947 | 03, 04 (Breast, High Met vs. Breast, Non-Met) | 8 | 0 | 7.81 | |
| 1186 | 452856 | 15, 16 (Normal Colon vs. Colon Tumor Tissue) | 6 | 0 | 6.34 | |
| 1187 | 558767 | 15, 16 (Normal Colon vs. Colon Tumor Tissue) | 8 | 1 | 8.46 | |
| 1188 | 15035 | 15, 17 (Normal Colon Tissue vs. Colon Metastasis) | 8 | 1 | 8.59 | |
| | | 15, 16 (Normal Colon vs. Colon Tumor Tissue) | 8 | 0 | 8.46 | |
| 1189 | 556421 | 15, 16 (Normal Colon vs. Colon Tumor Tissue) | 12 | 1 | 12.68 | |
| 1190 | 7082 | 03, 04 (Breast, High Met vs. Breast, Non-Met) | 10 | 0 | 9.76 | |
| 1191 | 452523 | 15, 17 (Normal Colon Tissue vs. Colon Metastasis) | 10 | 2 | 5.37 | |
| 1192 | 3242 | 01, 02 (Colon, High Met vs. Colon, Low Met) | 2 | 17 | | 9.22 |
| 1193 | 6660 | 01, 02 (Colon, High Met vs. Colon, Low Met) | 7 | 0 | 6.46 | |
| 1194 | 547 | 01, 02 (Colon, High Met vs. Colon, Low Met) | 35 | 67 | | 2.08 |
| | | 03, 04 (Breast, High Met vs. Breast, Non-Met) | 90 | 30 | 2.93 | |
| | | 15, 16 (Normal Colon vs. Colon Tumor Tissue) | 1 | 10 | | 9.46 |
| 1195 | 121213 | 16, 17 (Colon Tumor Tissue vs. Colon Metastasis) | 8 | 0 | 8.12 | |
| 1196 | 4378 | 16, 17 (Colon Tumor Tissue vs. Colon Metastasis) | 2 | 11 | | 5.42 |
| | | 03, 04 (Breast, High Met vs. Breast, Non-Met) | 1 | 8 | | 8.2 |
| | | 15, 16 (Normal Colon vs. Colon Tumor Tissue) | 11 | 2 | 5.81 | |
| 1197 | 185554 | 03, 04 (Breast, High Met vs. Breast, Non-Met) | 0 | 9 | | 9.22 |
| 1198 | 185482 | 03, 04 (Breast, High Met vs. Breast, Non-Met) | 0 | 13 | | 13.32 |
| 1200 | 66017 | 03, 04 (Breast, High Met vs. Breast, Non-Met) | 0 | 8 | | 8.2 |
| 1201 | 403111 | 15, 17 (Normal Colon Tissue vs. Colon Metastasis) | 6 | 0 | 6.44 | |
| | | 15, 16 (Normal Colon vs. Colon Tumor Tissue) | 6 | 0 | 6.34 | |
| 1202 | 3224 | 01, 02 (Colon, High Met vs. Colon, Low Met) | 17 | 2 | 7.84 | |
| 1203 | 966 | 01, 02 (Colon, High Met vs. Colon, Low Met) | 22 | 47 | | 2.32 |
| | | 03, 04 (Breast, High Met vs. Breast, Non-Met) | 50 | 19 | 2.57 | |
| 1204 | 3639 | 03, 04 (Breast, High Met vs. Breast, Non-Met) | 12 | 3 | 3.9 | |
| 1205 | 5388 | 03, 04 (Breast, High Met vs. Breast, Non-Met) | 5 | 21 | | 4.3 |
| 1206 | 3299 | 08, 09 (Lung, High Met vs. Lung, Low Met) | 10 | 1 | 13.97 | |
| | | 03, 04 (Breast, High Met vs. Breast, Non-Met) | 20 | 3 | 6.5 | |
| 1207 | 23760 | 03, 04 (Breast, High Met vs. Breast, Non-Met) | 4 | 34 | | 8.71 |
| 1208 | 729384 | 16, 17 (Colon Tumor Tissue vs. Colon Metastasis) | 7 | 0 | 7.11 | |
| | | 15, 16 (Normal Colon vs. Colon Tumor Tissue) | 0 | 7 | | 6.62 |
| 1209 | 46559 | 03, 04 (Breast, High Met vs. Breast, Non-Met) | 2 | 30 | | 15.37 |
| | | 15, 16 (Normal Colon vs. Colon Tumor Tissue) | 10 | 2 | 5.28 | |
| 1210 | 449750 | 15, 17 (Normal Colon Tissue vs. Colon Metastasis) | 4 | 28 | | 6.52 |
| | | 16, 17 (Colon Tumor Tissue vs. Colon Metastasis) | 1 | 28 | | 27.57 |
| 1211 | 735936 | 16, 17 (Colon Tumor Tissue vs. Colon Metastasis) | 9 | 0 | 9.14 | |
| | | 15, 16 (Normal Colon vs. Colon Tumor Tissue) | 0 | 9 | | 8.51 |
| 1212 | 607430 | 15, 16 (Normal Colon vs. Colon Tumor Tissue) | 6 | 0 | 6.34 | |
| 1213 | 452856 | 15, 16 (Normal Colon vs. Colon Tumor Tissue) | 6 | 0 | 6.34 | |
| 1214 | 557903 | 15, 16 (Normal Colon vs. Colon Tumor Tissue) | 0 | 9 | | 8.51 |
| 1215 | 453112 | 16, 17 (Colon Tumor Tissue vs. Colon Metastasis) | 3 | 13 | | 4.27 |
| | | 15, 17 (Normal Colon Tissue vs. Colon Metastasis) | 3 | 13 | | 4.04 |
| 1216 | 645900 | 23, 24 (Normal Lung Tissue vs. Lung Tumor Tissue) | 7 | 0 | 7.07 | |
| | | 15, 17 (Normal Colon Tissue vs. Colon Metastasis) | 9 | 0 | 9.66 | |
| | | 16, 17 (Colon Tumor Tissue vs. Colon Metastasis) | 9 | 0 | 9.14 | |
| 1217 | 415114 | 15, 16 (Normal Colon vs. Colon Tumor Tissue) | 10 | 0 | 10.57 | |
| 1218 | 418763 | 15, 17 (Normal Colon Tissue vs. Colon Metastasis) | 9 | 0 | 9.66 | |
| 1219 | 2245 | 03, 04 (Breast, High Met vs. Breast, Non-Met) | 13 | 1 | 12.68 | |
| | | 01, 02 (Colon, High Met vs. Colon, Low Met) | 12 | 27 | | 2.44 |
| 1220 | 403668 | 16, 17 (Colon Tumor Tissue vs. Colon Metastasis) | 13 | 3 | 4.4 | |
| | | 15, 16 (Normal Colon vs. Colon Tumor Tissue) | 2 | 13 | | 6.15 |
| 1221 | 15427 | 15, 17 (Normal Colon Tissue vs. Colon Metastasis) | 0 | 7 | | 6.52 |
| | | 15, 16 (Normal Colon vs. Colon Tumor Tissue) | 0 | 8 | | 7.57 |
| 1222 | 555714 | 15, 16 (Normal Colon vs. Colon Tumor Tissue) | 23 | 11 | 2.21 | |
| | | 15, 17 (Normal Colon Tissue vs. Colon Metastasis) | 23 | 7 | 3.53 | |
| 1223 | 555830 | 15, 17 (Normal Colon Tissue vs. Colon Metastasis) | 16 | 2 | 8.59 | |
| | | 15, 16 (Normal Colon vs. Colon Tumor Tissue) | 16 | 2 | 8.46 | |
| 1224 | 4620 | 03, 04 (Breast, High Met vs. Breast, Non-Met) | 7 | 0 | 6.83 | |
| 1225 | 171511 | 16, 17 (Colon Tumor Tissue vs. Colon Metastasis) | 7 | 0 | 7.11 | |
| | | 15, 16 (Normal Colon vs. Colon Tumor Tissue) | 0 | 7 | | 6.62 |
| 1226 | 451401 | 15, 17 (Normal Colon Tissue vs. Colon Metastasis) | 9 | 1 | 9.66 | |
| 1227 | 447501 | 15, 17 (Normal Colon Tissue vs. Colon Metastasis) | 15 | 3 | 5.37 | |
| 1228 | 460445 | 16, 17 (Colon Tumor Tissue vs. Colon Metastasis) | 0 | 6 | | 5.91 |
| 1229 | 375814 | 15, 17 (Normal Colon Tissue vs. Colon Metastasis) | 8 | 1 | 8.59 | |
| | | 15, 16 (Normal Colon vs. Colon Tumor Tissue) | 8 | 0 | 8.46 | |
| 1230 | 449356 | 15, 17 (Normal Colon Tissue vs. Colon Metastasis) | 7 | 21 | | 2.79 |
| | | 16, 17 (Colon Tumor Tissue vs. Colon Metastasis) | 4 | 21 | | 5.17 |
| 1231 | 468736 | 16, 17 (Colon Tumor Tissue vs. Colon Metastasis) | 0 | 6 | | 5.91 |
| 1232 | 548858 | 16, 17 (Colon Tumor Tissue vs. Colon Metastasis) | 0 | 11 | | 10.83 |
| 1233 | 3693 | 03, 04 (Breast, High Met vs. Breast, Non-Met) | 0 | 6 | | 6.15 |
| 1234 | 642973 | 16, 17 (Colon Tumor Tissue vs. Colon Metastasis) | 7 | 0 | 7.11 | |
| 1235 | 561180 | 15, 16 (Normal Colon vs. Colon Tumor Tissue) | 11 | 2 | 5.81 | |
| 1236 | 453708 | 16, 17 (Colon Tumor Tissue vs. Colon Metastasis) | 1 | 19 | | 18.71 |
| | | 15, 17 (Normal Colon Tissue vs. Colon Metastasis) | 1 | 19 | | 17.7 |
| 1237 | 645305 | 15, 17 (Normal Colon Tissue vs. Colon Metastasis) | 7 | 0 | 7.51 | |
| 1238 | 463487 | 15, 17 (Normal Colon Tissue vs. Colon Metastasis) | 8 | 1 | 8.59 | |
| 1239 | 11131 | 01, 02 (Colon, High Met vs. Colon, Low Met) | 0 | 6 | | 6.5 |
| 1240 | 561807 | 16, 17 (Colon Tumor Tissue vs. Colon Metastasis) | 1 | 8 | | 7.88 |
| 1241 | 452800 | 15, 17 (Normal Colon Tissue vs. Colon Metastasis) | 3 | 13 | | 4.04 |
| 1242 | 372960 | 15, 17 (Normal Colon Tissue vs. Colon Metastasis) | 6 | 18 | | 2.79 |
| | | 15, 16 (Normal Colon vs. Colon Tumor Tissue) | 6 | 33 | | 5.2 |
| 1243 | 449317 | 15, 17 (Normal Colon Tissue vs. Colon Metastasis) | 5 | 20 | | 3.73 |
| | | 16, 17 (Colon Tumor Tissue vs. Colon Metastasis) | 8 | 20 | | 2.46 |
| 1244 | 730759 | 16, 17 (Colon Tumor Tissue vs. Colon Metastasis) | 7 | 0 | 7.11 | |
| | | 15, 16 (Normal Colon vs. Colon Tumor Tissue) | 0 | 7 | | 6.62 |
| 1245 | 9113 | 01, 02 (Colon, High Met vs. Colon, Low Met) | 0 | 7 | | 7.59 |
| 1246 | 630259 | 15, 16 (Normal Colon vs. Colon Tumor Tissue) | 7 | 0 | 7.4 | |
| 1247 | 3516 | 01, 02 (Colon, High Met vs. Colon, Low Met) | 5 | 17 | | 3.69 |
| 1248 | 447494 | 15, 16 (Normal Colon vs. Colon Tumor Tissue) | 26 | 8 | 3.44 | |
| 1249 | 554500 | 15, 16 (Normal Colon vs. Colon Tumor Tissue) | 6 | 0 | 6.34 | |
| 1250 | 639662 | 15, 16 (Normal Colon vs. Colon Tumor Tissue) | 7 | 0 | 7.4 | |
| | | 15, 17 (Normal Colon Tissue vs. Colon Metastasis) | 7 | 0 | 7.51 | |
| 1251 | 421 | 15, 17 (Normal Colon Tissue vs. Colon Metastasis) | 0 | 7 | | 6.52 |
| 1252 | 736014 | 15, 16 (Normal Colon vs. Colon Tumor Tissue) | 0 | 6 | | 5.68 |
| | | 16, 17 (Colon Tumor Tissue vs. Colon Metastasis) | 6 | 0 | 6.09 | |
| 1253 | 643061 | 15, 17 (Normal Colon Tissue vs. Colon Metastasis) | 8 | 0 | 8.59 | |
| | | 15, 16 (Normal Colon vs. Colon Tumor Tissue) | 8 | 1 | 8.46 | |
| 1254 | 9113 | 01, 02 (Colon, High Met vs. Colon, Low Met) | 0 | 7 | | 7.59 |
| 1255 | 650856 | 16, 17 (Colon Tumor Tissue vs. Colon Metastasis) | 6 | 0 | 6.09 | |
| 1256 | 476223 | 23, 24 (Normal Lung Tissue vs. Lung Tumor Tissue) | 2 | 19 | | 9.4 |
| | | 15, 17 (Normal Colon Tissue vs. Colon Metastasis) | 7 | 0 | 7.51 | |
| 1257 | 737088 | 15, 16 (Normal Colon vs. Colon Tumor Tissue) | 0 | 6 | | 5.68 |
| | | 16, 17 (Colon Tumor Tissue vs. Colon Metastasis) | 6 | 0 | 6.09 | |
| 1258 | 449512 | 15, 17 (Normal Colon Tissue vs. Colon Metastasis) | 4 | 14 | | 3.26 |
| | | 16, 17 (Colon Tumor Tissue vs. Colon Metastasis) | 1 | 14 | | 13.79 |
| 1259 | 449457 | 15, 17 (Normal Colon Tissue vs. Colon Metastasis) | 0 | 7 | | 6.52 |
| 1260 | 521901 | 16, 17 (Colon Tumor Tissue vs. Colon Metastasis) | 0 | 6 | | 5.91 |
| 1261 | 175799 | 15, 16 (Normal Colon vs. Colon Tumor Tissue) | 14 | 3 | 4.93 | |
| | | 23, 24 (Normal Lung Tissue vs. Lung Tumor Tissue) | 1 | 9 | | 8.91 |
| 1262 | 550108 | 15, 16 (Normal Colon vs. Colon Tumor Tissue) | 6 | 19 | | 3 |
| | | 15, 17 (Normal Colon Tissue vs. Colon Metastasis) | 6 | 37 | | 5.75 |
| 1263 | 203605 | 15, 16 (Normal Colon vs. Colon Tumor Tissue) | 17 | 7 | 2.57 | |
| 1264 | 450429 | 15, 17 (Normal Colon Tissue vs. Colon Metastasis) | 13 | 1 | 13.95 | |
| | | 16, 17 (Colon Tumor Tissue vs. Colon Metastasis) | 10 | 1 | 10.16 | |
| 1265 | 2478 | 03, 04 (Breast, High Met vs. Breast, Non-Met) | 17 | 5 | 3.32 | |
| 1266 | 644099 | 15, 17 (Normal Colon Tissue vs. Colon Metastasis) | 6 | 0 | 6.44 | |
| 1267 | 552614 | 16, 17 (Colon Tumor Tissue vs. Colon Metastasis) | 0 | 7 | | 6.89 |
| 1268 | 452523 | 15, 17 (Normal Colon Tissue vs. Colon Metastasis) | 10 | 2 | 5.37 | |
| 1269 | 446789 | 15, 16 (Normal Colon vs. Colon Tumor Tissue) | 16 | 5 | 3.38 | |
| 1270 | 515631 | 15, 16 (Normal Colon vs. Colon Tumor Tissue) | 0 | 6 | | 5.68 |
| 1271 | 452523 | 15, 17 (Normal Colon Tissue vs. Colon Metastasis) | 10 | 2 | 5.37 | |
| 1272 | 640116 | 15, 17 (Normal Colon Tissue vs. Colon Metastasis) | 19 | 0 | 20.39 | |
| | | 15, 16 (Normal Colon vs. Colon Tumor Tissue) | 19 | 4 | 5.02 | |
| 1273 | 9113 | 01, 02 (Colon, High Met vs. Colon, Low Met) | 0 | 7 | | 7.59 |
| 1274 | 562221 | 15, 16 (Normal Colon vs. Colon Tumor Tissue) | 8 | 0 | 8.46 | |
| 1275 | 455972 | 15, 16 (Normal Colon vs. Colon Tumor Tissue) | 0 | 6 | | 5.68 |
| 1276 | 449137 | 15, 16 (Normal Colon vs. Colon Tumor Tissue) | 3 | 18 | | 5.68 |
| 1277 | 5078 | 15, 16 (Normal Colon vs. Colon Tumor Tissue) | 0 | 6 | | 5.68 |
| 1278 | 5078 | 15, 16 (Normal Colon vs. Colon Tumor Tissue) | 0 | 6 | | 5.68 |
| 1279 | 4016 | 03, 04 (Breast, High Met vs. Breast, Non-Met) | 0 | 6 | | 6.15 |
| | | 01, 02 (Colon, High Met vs. Colon, Low Met) | 5 | 14 | | 3.04 |
| 1280 | 403111 | 15, 16 (Normal Colon vs. Colon Tumor Tissue) | 6 | 0 | 6.34 | |
| | | 15, 17 (Normal Colon Tissue vs. Colon Metastasis) | 6 | 0 | 6.44 | |
| 1281 | 562292 | 16, 17 (Colon Tumor Tissue vs. Colon Metastasis) | 0 | 6 | | 5.91 |
| 1282 | 403111 | 15, 17 (Normal Colon Tissue vs. Colon Metastasis) | 6 | 0 | 6.44 | |
| | | 15, 16 (Normal Colon vs. Colon Tumor Tissue) | 6 | 0 | 6.34 | |
| 1283 | 403111 | 15, 16 (Normal Colon vs. Colon Tumor Tissue) | 6 | 0 | 6.34 | |
| | | 15, 17 (Normal Colon Tissue vs. Colon Metastasis) | 6 | 0 | 6.44 | |
| 1284 | 500959 | 15, 17 (Normal Colon Tissue vs. Colon Metastasis) | 8 | 0 | 8.59 | |
| | | 15, 16 (Normal Colon vs. Colon Tumor Tissue) | 8 | 0 | 8.46 | |
| 1285 | 763 | 01, 02 (Colon, High Met vs. Colon, Low Met) | 29 | 77 | | 2.88 |
| | | 03, 04 (Breast, High Met vs. Breast, Non-Met) | 42 | 10 | 4.1 | |
| 1286 | 763 | 03, 04 (Breast, High Met vs. Breast, Non-Met) | 42 | 10 | 4.1 | |
| | | 01, 02 (Colon, High Met vs. Colon, Low Met) | 29 | 77 | | 2.88 |
| 1287 | 500959 | 15, 17 (Normal Colon Tissue vs. Colon Metastasis) | 8 | 0 | 8.59 | |
| | | 15, 16 (Normal Colon vs. Colon Tumor Tissue) | 8 | 0 | 8.46 | |
| 1288 | 452071 | 15, 17 (Normal Colon Tissue vs. Colon Metastasis) | 109 | 0 | 117 | |
| | | 18, 20 (Normal Colon Tissue vs. Colon Metastasis) | 14 | 0 | 11.97 | |
| | | 15, 16 (Normal Colon vs. Colon Tumor Tissue) | 109 | 1 | 115.21 | |
| | | 18, 19 (Normal Colon Tissue vs. Colon Tumor) | 14 | 0 | 16 | |
| 1289 | 468672 | 15, 16 (Normal Colon vs. Colon Tumor Tissue) | 6 | 0 | 6.34 | |
| | | 16, 17 (Colon Tumor Tissue vs. Colon Metastasis) | 0 | 8 | | 7.88 |
| 1290 | 455492 | 15, 16 (Normal Colon vs. Colon Tumor Tissue) | 8 | 1 | 8.46 | |
| 1291 | 639667 | 16, 17 (Colon Tumor Tissue vs. Colon Metastasis) | 9 | 0 | 9.14 | |
| 1292 | 549829 | 16, 17 (Colon Tumor Tissue vs. Colon Metastasis) | 0 | 6 | | 5.91 |
| 1293 | 553158 | 16, 17 (Colon Tumor Tissue vs. Colon Metastasis) | 1 | 8 | | 7.88 |
| 1294 | 561485 | 15, 17 (Normal Colon Tissue vs. Colon Metastasis) | 0 | 7 | | 6.52 |
| | | 16, 17 (Colon Tumor Tissue vs. Colon Metastasis) | 0 | 7 | | 6.89 |
| 1295 | 639352 | 15, 17 (Normal Colon Tissue vs. Colon Metastasis) | 7 | 0 | 7.51 | |
| | | 15, 16 (Normal Colon vs. Colon Tumor Tissue) | 7 | 0 | 7.4 | |
| 1296 | 451401 | 15, 17 (Normal Colon Tissue vs. Colon Metastasis) | 9 | 1 | 9.66 | |
| 1297 | 643103 | 15, 16 (Normal Colon vs. Colon Tumor Tissue) | 7 | 0 | 7.4 | |
| | | 15, 17 (Normal Colon Tissue vs. Colon Metastasis) | 7 | 0 | 7.51 | |
| 1298 | 468736 | 16, 17 (Colon Tumor Tissue vs. Colon Metastasis) | 0 | 6 | | 5.91 |
| 1299 | 218416 | 16, 17 (Colon Tumor Tissue vs. Colon Metastasis) | 0 | 6 | | 5.91 |
| 1300 | 447501 | 15, 17 (Normal Colon Tissue vs. Colon Metastasis) | 15 | 3 | 5.37 | |
| 1301 | 558371 | 15, 17 (Normal Colon Tissue vs. Colon Metastasis) | 10 | 2 | 5.37 | |
| | | 15, 16 (Normal Colon vs. Colon Tumor Tissue) | 10 | 2 | 5.28 | |
| 1302 | 561794 | 15, 16 (Normal Colon vs. Colon Tumor Tissue) | 0 | 6 | | 5.68 |
| 1303 | 645065 | 15, 17 (Normal Colon Tissue vs. Colon Metastasis) | 6 | 0 | 6.44 | |
| 1304 | 451269 | 15, 16 (Normal Colon vs. Colon Tumor Tissue) | 13 | 3 | 4.58 | |
| | | 15, 17 (Normal Colon Tissue vs. Colon Metastasis) | 13 | 4 | 3.49 | |
| 1305 | 401553 | 15, 17 (Normal Colon Tissue vs. Colon Metastasis) | 8 | 0 | 8.59 | |
| 1306 | 555276 | 16, 17 (Colon Tumor Tissue vs. Colon Metastasis) | 0 | 6 | | 5.91 |
| 1307 | 551617 | 15, 16 (Normal Colon vs. Colon Tumor Tissue) | 9 | 0 | 9.51 | |
| | | 16, 17 (Colon Tumor Tissue vs. Colon Metastasis) | 0 | 7 | | 6.89 |
| 1308 | 463480 | 16, 17 (Colon Tumor Tissue vs. Colon Metastasis) | 0 | 6 | | 5.91 |
| 1309 | 549178 | 15, 17 (Normal Colon Tissue vs. Colon Metastasis) | 1 | 10 | | 9.32 |
| | | 16, 17 (Colon Tumor Tissue vs. Colon Metastasis) | 0 | 10 | | 9.85 |
| 1310 | 374450 | 15, 17 (Normal Colon Tissue vs. Colon Metastasis) | 7 | 0 | 7.51 | |
| | | 15, 16 (Normal Colon vs. Colon Tumor Tissue) | 7 | 0 | 7.4 | |
| 1311 | 562835 | 15, 17 (Normal Colon Tissue vs. Colon Metastasis) | 0 | 9 | | 8.38 |
| 1312 | 730555 | 15, 16 (Normal Colon vs. Colon Tumor Tissue) | 0 | 6 | | 5.68 |
| | | 16, 17 (Colon Tumor Tissue vs. Colon Metastasis) | 6 | 0 | 6.09 | |
| 1313 | 732978 | 16, 17 (Colon Tumor Tissue vs. Colon Metastasis) | 7 | 0 | 7.11 | |
| | | 15, 16 (Normal Colon vs. Colon Tumor Tissue) | 0 | 7 | | 6.62 |
| 1314 | 1609 | 01, 02 (Colon, High Met vs. Colon, Low Met) | 3 | 58 | | 20.96 |
| | | 03, 04 (Breast, High Met vs. Breast, Non-Met) | 10 | 2 | 4.88 | |
| | | 15, 17 (Normal Colon Tissue vs. Colon Metastasis) | 15 | 3 | 5.37 | |
| | | 16, 17 (Colon Tumor Tissue vs. Colon Metastasis) | 14 | 3 | 4.74 | |
| 1315 | 18591 | 08, 09 (Lung, High Met vs. Lung, Low Met) | 8 | 0 | 11.18 | |
| | | 15, 16 (Normal Colon vs. Colon Tumor Tissue) | 30 | 8 | 3.96 | |
| 1316 | 553158 | 16, 17 (Colon Tumor Tissue vs. Colon Metastasis) | 1 | 8 | | 7.88 |
| 1317 | 470602 | 16, 17 (Colon Tumor Tissue vs. Colon Metastasis) | 1 | 9 | | 8.86 |
| | | 15, 16 (Normal Colon vs. Colon Tumor Tissue) | 12 | 1 | 12.68 | |
| 1318 | 639662 | 15, 16 (Normal Colon vs. Colon Tumor Tissue) | 7 | 0 | 7.4 | |
| | | 15, 17 (Normal Colon Tissue vs. Colon Metastasis) | 7 | 0 | 7.51 | |
| 1319 | 644721 | 15, 17 (Normal Colon Tissue vs. Colon Metastasis) | 6 | 0 | 6.44 | |
| 1320 | 453202 | 15, 16 (Normal Colon vs. Colon Tumor Tissue) | 6 | 0 | 6.34 | |
| | | 16, 17 (Colon Tumor Tissue vs. Colon Metastasis) | 0 | 11 | | 10.83 |
| 1321 | 554655 | 15, 16 (Normal Colon vs. Colon Tumor Tissue) | 0 | 6 | | 5.68 |
| 1322 | 641988 | 15, 17 (Normal Colon Tissue vs. Colon Metastasis) | 7 | 0 | 7.51 | |
| 1323 | 453112 | 16, 17 (Colon Tumor Tissue vs. Colon Metastasis) | 3 | 13 | | 4.27 |
| | | 15, 17 (Normal Colon Tissue vs. Colon Metastasis) | 3 | 13 | | 4.04 |
| 1324 | 550694 | 15, 16 (Normal Colon vs. Colon Tumor Tissue) | 21 | 1 | 22.2 | |
| | | 15, 17 (Normal Colon Tissue vs. Colon Metastasis) | 21 | 7 | 3.22 | |
| 1325 | 649106 | 15, 17 (Normal Colon Tissue vs. Colon Metastasis) | 7 | 0 | 7.51 | |
| 1326 | 638973 | 16, 17 (Colon Tumor Tissue vs. Colon Metastasis) | 12 | 0 | 12.19 | |
| | | 15, 17 (Normal Colon Tissue vs. Colon Metastasis) | 7 | 0 | 7.51 | |
| 1327 | 549911 | 16, 17 (Colon Tumor Tissue vs. Colon Metastasis) | 0 | 6 | | 5.91 |
| 1328 | 648774 | 15, 17 (Normal Colon Tissue vs. Colon Metastasis) | 6 | 0 | 6.44 | |
| 1329 | 549911 | 16, 17 (Colon Tumor Tissue vs. Colon Metastasis) | 0 | 6 | | 5.91 |
| 1330 | 639662 | 15, 17 (Normal Colon Tissue vs. Colon Metastasis) | 7 | 0 | 7.51 | |
| | | 15, 16 (Normal Colon vs. Colon Tumor Tissue) | 7 | 0 | 7.4 | |
| 1331 | 560455 | 15, 17 (Normal Colon Tissue vs. Colon Metastasis) | 0 | 7 | | 6.52 |
| 1332 | 735805 | 16, 17 (Colon Tumor Tissue vs. Colon Metastasis) | 6 | 0 | 6.09 | |
| | | 15, 16 (Normal Colon vs. Colon Tumor Tissue) | 0 | 6 | | 5.68 |
| 1333 | 732712 | 16, 17 (Colon Tumor Tissue vs. Colon Metastasis) | 7 | 0 | 7.11 | |
| | | 15, 16 (Normal Colon vs. Colon Tumor Tissue) | 0 | 7 | | 6.62 |
| 1334 | 446663 | 15, 17 (Normal Colon Tissue vs. Colon Metastasis) | 14 | 32 | | 2.13 |
| | | 16, 17 (Colon Tumor Tissue vs. Colon Metastasis) | 6 | 32 | | 52.5 |
| | | 19, 20 (Colon Tumor Tissue vs. Colon Metastasis) | 0 | 8 | | 10.7 |
| | | 18, 20 (Normal Colon Tissue vs. Colon Metastasis) | 1 | 8 | | 9.36 |
| 1335 | 226324 | 16, 17 (Colon Tumor Tissue vs. Colon Metastasis) | 0 | 6 | | 5.91 |
| 1336 | 453016 | 16, 17 (Colon Tumor Tissue vs. Colon Metastasis) | 6 | 0 | 6.09 | |
| | | 15, 16 (Normal Colon vs. Colon Tumor Tissue) | 0 | 6 | | 5.68 |
| 1337 | 550998 | 15, 16 (Normal Colon vs. Colon Tumor Tissue) | 0 | 6 | | 5.68 |
| 1338 | 452414 | 15, 16 (Normal Colon vs. Colon Tumor Tissue) | 17 | 0 | 17.97 | |
| | | 15, 17 (Normal Colon Tissue vs. Colon Metastasis) | 17 | 0 | 18.25 | |
| 1339 | 129535 | 15, 17 (Normal Colon Tissue vs. Colon Metastasis) | 41 | 1 | 44.01 | |
| | | 08, 09 (Lung, High Met vs. Lung, Low Met) | 2 | 22 | | 7.87 |
| | | 15, 16 (Normal Colon vs. Colon Tumor Tissue) | 41 | 5 | 8.67 | |
| 1340 | 447089 | 16, 17 (Colon Tumor Tissue vs. Colon Metastasis) | 1 | 8 | | 7.88 |
| 1341 | 447850 | 16, 17 (Colon Tumor Tissue vs. Colon Metastasis) | 0 | 6 | | 5.91 |
| 1342 | 556216 | 15, 17 (Normal Colon Tissue vs. Colon Metastasis) | 0 | 7 | | 6.52 |
| | | 16, 17 (Colon Tumor Tissue vs. Colon Metastasis) | 0 | 7 | | 6.89 |
| 1343 | 452523 | 15, 17 (Normal Colon Tissue vs. Colon Metastasis) | 10 | 2 | 5.37 | |
| 1344 | 44424 | 16, 17 (Colon Tumor Tissue vs. Colon Metastasis) | 41 | 90 | | 2.16 |
| | | 08, 09 (Lung, High Met vs. Lung, Low Met) | 4 | 40 | | 7.16 |
| | | 15, 17 (Normal Colon Tissue vs. Colon Metastasis) | 25 | 90 | | 3.35 |
| 1345 | 648872 | 15, 17 (Normal Colon Tissue vs. Colon Metastasis) | 6 | 0 | 6.44 | |
| | | 15, 16 (Normal Colon vs. Colon Tumor Tissue) | 6 | 0 | 6.34 | |
| 1346 | 451636 | 16, 17 (Colon Tumor Tissue vs. Colon Metastasis) | 1 | 8 | | 7.88 |
| 1347 | 5078 | 15, 16 (Normal Colon vs. Colon Tumor Tissue) | 0 | 6 | | 5.68 |
| 1348 | 403111 | 15, 17 (Normal Colon Tissue vs. Colon Metastasis) | 6 | 0 | 6.44 | |
| | | 15, 16 (Normal Colon vs. Colon Tumor Tissue) | 6 | 0 | 6.34 | |
| 1349 | 648959 | 15, 16 (Normal Colon vs. Colon Tumor Tissue) | 7 | 0 | 7.4 | |
| | | 15, 17 (Normal Colon Tissue vs. Colon Metastasis) | 7 | 0 | 7.51 | |
| 1350 | 380291 | 15, 16 (Normal Colon vs. Colon Tumor Tissue) | 6 | 0 | 6.34 | |
| 1351 | 380291 | 15, 16 (Normal Colon vs. Colon Tumor Tissue) | 6 | 0 | 6.34 | |
| 1352 | 230995 | 15, 16 (Normal Colon vs. Colon Tumor Tissue) | 0 | 7 | | 6.62 |
| 1353 | 562221 | 15, 16 (Normal Colon vs. Colon Tumor Tissue) | 8 | 0 | 8.46 | |
| 1354 | 450959 | 15, 16 (Normal Colon vs. Colon Tumor Tissue) | 1 | 9 | | 8.51 |
| 1355 | 452833 | 15, 17 (Normal Colon Tissue vs. Colon Metastasis) | 0 | 7 | | 6.52 |
| 1356 | 550195 | 16, 17 (Colon Tumor Tissue vs. Colon Metastasis) | 0 | 11 | | 10.83 |
| | | 15, 17 (Normal Colon Tissue vs. Colon Metastasis) | 2 | 11 | | 5.12 |
| 1357 | 448927 | 15, 17 (Normal Colon Tissue vs. Colon Metastasis) | 2 | 12 | | 5.59 |
| 1358 | 551514 | 16, 17 (Colon Tumor Tissue vs. Colon Metastasis) | 1 | 13 | | 12.8 |
| | | 15, 16 (Normal Colon vs. Colon Tumor Tissue) | 8 | 1 | 8.46 | |
| 1359 | 549829 | 16, 17 (Colon Tumor Tissue vs. Colon Metastasis) | 0 | 6 | | 5.91 |
| 1360 | 551514 | 15, 16 (Normal Colon vs. Colon Tumor Tissue) | 8 | 1 | 8.46 | |
| | | 16, 17 (Colon Tumor Tissue vs. Colon Metastasis) | 1 | 13 | | 12.8 |
| 1361 | 561485 | 16, 17 (Colon Tumor Tissue vs. Colon Metastasis) | 0 | 7 | | 6.89 |
| | | 15, 17 (Normal Colon Tissue vs. Colon Metastasis) | 0 | 7 | | 6.52 |
| 1362 | 453846 | 15, 17 (Normal Colon Tissue vs. Colon Metastasis) | 0 | 11 | | 10.25 |
| 1363 | 69863 | 08, 09 (Lung, High Met vs. Lung, Low Met) | 3 | 23 | | 5.49 |
| | | 03, 04 (Breast, High Met vs. Breast, Non-Met) | 3 | 21 | | 7.17 |
| 1364 | 727181 | 15, 16 (Normal Colon vs. Colon Tumor Tissue) | 0 | 6 | | 5.68 |
| | | 16, 17 (Colon Tumor Tissue vs. Colon Metastasis) | 6 | 0 | 6.09 | |
| 1365 | 454050 | 15, 17 (Normal Colon Tissue vs. Colon Metastasis) | 8 | 1 | 8.59 | |
| 1366 | 725994 | 15, 16 (Normal Colon vs. Colon Tumor Tissue) | 0 | 6 | | 5.68 |
| | | 16, 17 (Colon Tumor Tissue vs. Colon Metastasis) | 6 | 0 | 6.09 | |
| 1367 | 1495 | 03, 04 (Breast, High Met vs. Breast, Non-Met) | 31 | 12 | 2.52 | |
| 1368 | 5665 | 03, 04 (Breast, High Met vs. Breast, Non-Met) | 13 | 0 | 12.68 | |
| 1369 | 5665 | 03, 04 (Breast, High Met vs. Breast, Non-Met) | 13 | 0 | 12.68 | |
| 1370 | 646146 | 16, 17 (Colon Tumor Tissue vs. Colon Metastasis) | 6 | 0 | 6.09 | |
| | | 15, 17 (Normal Colon Tissue vs. Colon Metastasis) | 8 | 0 | 8.59 | |
| 1371 | 8371 | 01, 02 (Colon, High Met vs. Colon, Low Met) | 0 | 6 | | 6.5 |
| 1372 | 73812 | 03, 04 (Breast, High Met vs. Breast, Non-Met) | 0 | 12 | | 12.3 |
| 1373 | 4242 | 03, 04 (Breast, High Met vs. Breast, Non-Met) | 17 | 0 | 16.59 | |
| 1374 | 5482 | 01, 02 (Colon, High Met vs. Colon, Low Met) | 1 | 8 | | 8.67 |
| 1375 | 5474 | 01, 02 (Colon, High Met vs. Colon, Low Met) | 1 | 8 | | 8.67 |
| | | 03, 04 (Breast, High Met vs. Breast, Non-Met) | 5 | 17 | | 3.48 |
| 1376 | 5448 | 01, 02 (Colon, High Met vs. Colon, Low Met) | 1 | 10 | | 10.84 |
| 1377 | 7607 | 15, 17 (Normal Colon Tissue vs. Colon Metastasis) | 13 | 3 | 4.65 | |
| | | 01, 02 (Colon, High Met vs. Colon, Low Met) | 0 | 7 | | 7.59 |
| | | 15, 16 (Normal Colon vs. Colon Tumor Tissue) | 13 | 4 | 3.44 | |
| 1378 | 555928 | 15, 16 (Normal Colon vs. Colon Tumor Tissue) | 0 | 6 | | 5.68 |
| 1379 | 4046 | 01, 02 (Colon, High Met vs. Colon, Low Met) | 4 | 14 | | 3.79 |
| 1380 | 554080 | 16, 17 (Colon Tumor Tissue vs. Colon Metastasis) | 1 | 9 | | 8.86 |
| 1381 | 451092 | 16, 17 (Colon Tumor Tissue vs. Colon Metastasis) | 1 | 9 | | 8.86 |
| 1382 | 551380 | 16, 17 (Colon Tumor Tissue vs. Colon Metastasis) | 4 | 14 | | 3.45 |
| 1383 | 546642 | 16, 17 (Colon Tumor Tissue vs. Colon Metastasis) | 11 | 0 | 11.17 | |
| 1384 | 1764 | 03, 04 (Breast, High Met vs. Breast, Non-Met) | 27 | 4 | 6.59 | |
| | | 01, 02 (Colon, High Met vs. Colon, Low Met) | 25 | 8 | 2.88 | |
| 1385 | 650773 | 15, 17 (Normal Colon Tissue vs. Colon Metastasis) | 6 | 0 | 6.44 | |
| 1386 | 644205 | 15, 17 (Normal Colon Tissue vs. Colon Metastasis) | 7 | 0 | 7.51 | |
| | | 15, 16 (Normal Colon vs. Colon Tumor Tissue) | 7 | 0 | 7.4 | |
| 1387 | 185718 | 03, 04 (Breast, High Met vs. Breast, Non-Met) | 0 | 6 | | 6.15 |
| 1388 | 5538 | 01, 02 (Colon, High Met vs. Colon, Low Met) | 0 | 8 | | 8.67 |
| | | 03, 04 (Breast, High Met vs. Breast, Non-Met) | 6 | 0 | 5.85 | |
| 1389 | 7546 | 01, 02 (Colon, High Met vs. Colon, Low Met) | 8 | 0 | 7.38 | |
| 1390 | 727789 | 15, 16 (Normal Colon vs. Colon Tumor Tissue) | 0 | 6 | | 5.68 |
| | | 16, 17 (Colon Tumor Tissue vs. Colon Metastasis) | 6 | 0 | 6.09 | |
| 1391 | 3837 | 03, 04 (Breast, High Met vs. Breast, Non-Met) | 9 | 1 | 8.78 | |
| 1392 | 380477 | 15, 17 (Normal Colon Tissue vs. Colon Metastasis) | 7 | 0 | 7.51 | |
| 1393 | 3299 | 03, 04 (Breast, High Met vs. Breast, Non-Met) | 20 | 3 | 6.5 | |
| | | 08, 09 (Lung, High Met vs. Lung, Low Met) | 10 | 1 | 13.97 | |
| 1394 | 448853 | 15, 16 (Normal Colon vs. Colon Tumor Tissue) | 1 | 10 | | 9.46 |
| 1395 | 736701 | 23, 24 (Normal Lung Tissue vs. Lung Tumor Tissue) | 10 | 0 | 10.1 | |
| | | 16, 17 (Colon Tumor Tissue vs. Colon Metastasis) | 6 | 0 | 6.09 | |
| | | 15, 16 (Normal Colon vs. Colon Tumor Tissue) | 0 | 6 | | 5.68 |
| 1396 | 735296 | 16, 17 (Colon Tumor Tissue vs. Colon Metastasis) | 6 | 0 | 6.09 | |
| | | 15, 16 (Normal Colon vs. Colon Tumor Tissue) | 0 | 6 | | 5.68 |
| 1397 | 13666 | 03, 04 (Breast, High Met vs. Breast, Non-Met) | 1 | 9 | | 9.22 |
| 1398 | 732712 | 15, 16 (Normal Colon vs. Colon Tumor Tissue) | 0 | 7 | | 6.62 |
| | | 16, 17 (Colon Tumor Tissue vs. Colon Metastasis) | 7 | 0 | 7.11 | |
| 1399 | 3765 | 01, 02 (Colon, High Met vs. Colon, Low Met) | 19 | 6 | 2.92 | |
| 1400 | 185596 | 03, 04 (Breast, High Met vs. Breast, Non-Met) | 0 | 8 | | 8.2 |
| 1401 | 1943 | 03, 04 (Breast, High Met vs. Breast, Non-Met) | 16 | 4 | 3.9 | |
| | | 15, 16 (Normal Colon vs. Colon Tumor Tissue) | 6 | 19 | | 3 |
| | | 01, 02 (Colon, High Met vs. Colon, Low Met) | 9 | 29 | | 3.49 |
| 1402 | 448193 | 16, 17 (Colon Tumor Tissue vs. Colon Metastasis) | 10 | 2 | 5.08 | |
| | | 15, 16 (Normal Colon vs. Colon Tumor Tissue) | 1 | 10 | | 9.46 |
| 1403 | 1793 | 01, 02 (Colon, High Met vs. Colon, Low Met) | 13 | 27 | | 2.25 |
| | | 03, 04 (Breast, High Met vs. Breast, Non-Met) | 35 | 13 | 2.63 | |
| 1404 | 2475 | 03, 04 (Breast, High Met vs. Breast, Non-Met) | 5 | 35 | | 7.17 |
| 1405 | 730866 | 16, 17 (Colon Tumor Tissue vs. Colon Metastasis) | 8 | 0 | 8.12 | |
| | | 15, 16 (Normal Colon vs. Colon Tumor Tissue) | 0 | 8 | | 7.57 |
| 1406 | 730389 | 15, 16 (Normal Colon vs. Colon Tumor Tissue) | 0 | 9 | | 8.51 |
| | | 16, 17 (Colon Tumor Tissue vs. Colon Metastasis) | 9 | 0 | 9.14 | |
| 1407 | 641884 | 15, 17 (Normal Colon Tissue vs. Colon Metastasis) | 8 | 0 | 8.59 | |
| | | 16, 17 (Colon Tumor Tissue vs. Colon Metastasis) | 7 | 0 | 7.11 | |
| 1408 | 463487 | 15, 17 (Normal Colon Tissue vs. Colon Metastasis) | 8 | 1 | 8.59 | |
| 1409 | 5156 | 01, 02 (Colon, High Met vs. Colon, Low Met) | 1 | 8 | | 8.67 |
| 1410 | 728408 | 15, 16 (Normal Colon vs. Colon Tumor Tissue) | 0 | 12 | | 11.35 |
| | | 16, 17 (Colon Tumor Tissue vs. Colon Metastasis) | 12 | 0 | 12.19 | |
| 1411 | 73812 | 03, 04 (Breast, High Met vs. Breast, Non-Met) | 0 | 12 | | 12.3 |
| 1412 | 1662 | 01, 02 (Colon, High Met vs. Colon, Low Met) | 7 | 34 | | 5.27 |
| | | 03, 04 (Breast, High Met vs. Breast, Non-Met) | 31 | 5 | 6.05 | |
| 1413 | 736556 | 16, 17 (Colon Tumor Tissue vs. Colon Metastasis) | 8 | 0 | 8.12 | |
| | | 15, 16 (Normal Colon vs. Colon Tumor Tissue) | 0 | 8 | | 7.57 |
| 1414 | 5240 | 08, 09 (Lung, High Met vs. Lung, Low Met) | 18 | 10 | 2.52 | |
| | | 03, 04 (Breast, High Met vs. Breast, Non-Met) | 12 | 2 | 5.85 | |
| 1415 | 6184 | 01, 02 (Colon, High Met vs. Colon, Low Met) | 0 | 8 | | 8.67 |
| 1416 | 446404 | 18, 19 (Normal Colon Tissue vs. Colon Tumor) | 23 | 0 | 26.28 | |
| | | 15, 17 (Normal Colon Tissue vs. Colon Metastasis) | 73 | 0 | 78.36 | |
| | | 18, 20 (Normal Colon Tissue vs. Colon Metastasis) | 23 | 0 | 19.66 | |
| | | 15, 16 (Normal Colon vs. Colon Tumor Tissue) | 73 | 1 | 77.16 | |
| 1417 | 646825 | 15, 17 (Normal Colon Tissue vs. Colon Metastasis) | 10 | 0 | 10.73 | |
| 1418 | 734929 | 15, 16 (Normal Colon vs. Colon Tumor Tissue) | 0 | 6 | | 5.68 |
| | | 16, 17 (Colon Tumor Tissue vs. Colon Metastasis) | 6 | 0 | 6.09 | |
| 1419 | 648851 | 15, 17 (Normal Colon Tissue vs. Colon Metastasis) | 6 | 0 | 6.44 | |
| 1420 | 640135 | 16, 17 (Colon Tumor Tissue vs. Colon Metastasis) | 6 | 0 | 6.09 | |
| | | 15, 17 (Normal Colon Tissue vs. Colon Metastasis) | 8 | 0 | 8.59 | |
| 1421 | 7443 | 03, 04 (Breast, High Met vs. Breast, Non-Met) | 9 | 0 | 8.78 | |
| 1422 | 454050 | 15, 17 (Normal Colon Tissue vs. Colon Metastasis) | 8 | 1 | 8.59 | |
| 1423 | 3765 | 01, 02 (Colon, High Met vs. Colon, Low Met) | 19 | 6 | 2.92 | |
| 1424 | 648320 | 15, 17 (Normal Colon Tissue vs. Colon Metastasis) | 6 | 0 | 6.44 | |
| | | 15, 16 (Normal Colon vs. Colon Tumor Tissue) | 6 | 0 | 6.34 | |
| 1425 | 451269 | 15, 17 (Normal Colon Tissue vs. Colon Metastasis) | 13 | 4 | 3.49 | |
| | | 15, 16 (Normal Colon vs. Colon Tumor Tissue) | 13 | 3 | 4.58 | |
| 1426 | 535208 | 15, 17 (Normal Colon Tissue vs. Colon Metastasis) | 6 | 0 | 6.44 | |
| | | 15, 16 (Normal Colon vs. Colon Tumor Tissue) | 6 | 0 | 6.34 | |
| 1427 | 728115 | 15, 16 (Normal Colon vs. Colon Tumor Tissue) | 0 | 7 | | 6.62 |
| | | 16, 17 (Colon Tumor Tissue vs. Colon Metastasis) | 7 | 0 | 7.11 | |
| 1428 | 5240 | 03, 04 (Breast, High Met vs. Breast, Non-Met) | 12 | 2 | 5.85 | |
| | | 08, 09 (Lung, High Met vs. Lung, Low Met) | 18 | 10 | 2.52 | |
| 1429 | 909 | 08, 09 (Lung, High Met vs. Lung, Low Met) | 34 | 4 | 11.88 | |
| | | 03, 04 (Breast, High Met vs. Breast, Non-Met) | 54 | 18 | 2.93 | |
| 1430 | 447697 | 15, 16 (Normal Colon vs. Colon Tumor Tissue) | 2 | 11 | | 5.2 |
| 1431 | 447737 | 15, 16 (Normal Colon vs. Colon Tumor Tissue) | 19 | 6 | 3.35 | |
| 1432 | 651100 | 15, 17 (Normal Colon Tissue vs. Colon Metastasis) | 7 | 0 | 7.51 | |
| 1433 | 735477 | 15, 16 (Normal Colon vs. Colon Tumor Tissue) | 0 | 7 | | 6.62 |
| | | 16, 17 (Colon Tumor Tissue vs. Colon Metastasis) | 7 | 0 | 7.11 | |
| 1434 | 3774 | 01, 02 (Colon, High Met vs. Colon, Low Met) | 1 | 12 | | 13.01 |
| 1435 | 646146 | 16, 17 (Colon Tumor Tissue vs. Colon Metastasis) | 6 | 0 | 6.09 | |
| | | 15, 17 (Normal Colon Tissue vs. Colon Metastasis) | 8 | 0 | 8.59 | |
| 1436 | 643931 | 15, 17 (Normal Colon Tissue vs. Colon Metastasis) | 7 | 0 | 7.51 | |
| 1437 | 463487 | 15, 17 (Normal Colon Tissue vs. Colon Metastasis) | 8 | 1 | 8.59 | |
| 1438 | 650097 | 16, 17 (Colon Tumor Tissue vs. Colon Metastasis) | 6 | 0 | 6.09 | |
| 1439 | 554469 | 15, 17 (Normal Colon Tissue vs. Colon Metastasis) | 24 | 3 | 8.59 | |
| | | 15, 16 (Normal Colon vs. Colon Tumor Tissue) | 24 | 8 | 3.17 | |
| 1440 | 476223 | 15, 17 (Normal Colon Tissue vs. Colon Metastasis) | 7 | 0 | 7.51 | |
| | | 23, 24 (Normal Lung Tissue vs. Lung Tumor Tissue) | 2 | 19 | | 9.4 |
| 1441 | 8738 | 03, 04 (Breast, High Met vs. Breast, Non-Met) | 6 | 0 | 5.85 | |
| 1442 | 403978 | 23, 24 (Normal Lung Tissue vs. Lung Tumor Tissue) | 23 | 50 | | 2.15 |
| | | 15, 16 (Normal Colon vs. Colon Tumor Tissue) | 7 | 19 | | 2.57 |
| 1443 | 185539 | 03, 04 (Breast, High Met vs. Breast, Non-Met) | 0 | 10 | | 10.25 |
| 1444 | 451811 | 15, 17 (Normal Colon Tissue vs. Colon Metastasis) | 10 | 2 | 5.37 | |
| 1445 | 140731 | 15, 17 (Normal Colon Tissue vs. Colon Metastasis) | 7 | 0 | 7.51 | |
| 1446 | 734582 | 15, 16 (Normal Colon vs. Colon Tumor Tissue) | 0 | 6 | | 5.68 |
| | | 16, 17 (Colon Tumor Tissue vs. Colon Metastasis) | 6 | 0 | 6.09 | |
| 1447 | 463487 | 15, 17 (Normal Colon Tissue vs. Colon Metastasis) | 8 | 1 | 8.59 | |
| 1448 | 558719 | 15, 16 (Normal Colon vs. Colon Tumor Tissue) | 18 | 6 | 3.17 | |
| 1449 | 21669 | 16, 17 (Colon Tumor Tissue vs. Colon Metastasis) | 0 | 7 | | 6.89 |
| 1450 | 470462 | 15, 17 (Normal Colon Tissue vs. Colon Metastasis) | 7 | 0 | 7.51 | |
| 1451 | 3316 | 16, 17 (Colon Tumor Tissue vs. Colon Metastasis) | 0 | 6 | | 5.91 |
| 1452 | 553728 | 16, 17 (Colon Tumor Tissue vs. Colon Metastasis) | 0 | 11 | | 10.83 |
| 1453 | 736014 | 15, 16 (Normal Colon vs. Colon Tumor Tissue) | 0 | 6 | | 5.68 |
| | | 16, 17 (Colon Tumor Tissue vs. Colon Metastasis) | 6 | 0 | 6.09 | |
| 1454 | 237288 | 15, 17 (Normal Colon Tissue vs. Colon Metastasis) | 7 | 0 | 7.51 | |
| | | 15, 16 (Normal Colon vs. Colon Tumor Tissue) | 7 | 0 | 7.4 | |
| 1455 | 11141 | 01, 02 (Colon, High Met vs. Colon, Low Met) | 0 | 6 | | 6.5 |
| 1456 | 556421 | 15, 16 (Normal Colon vs. Colon Tumor Tissue) | 12 | 1 | 12.68 | |
| 1457 | 549435 | 15, 16 (Normal Colon vs. Colon Tumor Tissue) | 14 | 2 | 7.4 | |
| 1458 | 448927 | 15, 17 (Normal Colon Tissue vs. Colon Metastasis) | 2 | 12 | | 5.59 |
| 1459 | 379105 | 15, 16 (Normal Colon vs. Colon Tumor Tissue) | 0 | 8 | | 7.57 |
| 1460 | 552614 | 16, 17 (Colon Tumor Tissue vs. Colon Metastasis) | 0 | 7 | | 6.89 |
| 1461 | 470602 | 15, 16 (Normal Colon vs. Colon Tumor Tissue) | 12 | 1 | 12.68 | |
| | | 16, 17 (Colon Tumor Tissue vs. Colon Metastasis) | 1 | 9 | | 8.86 |
| 1462 | 557039 | 16, 17 (Colon Tumor Tissue vs. Colon Metastasis) | 2 | 16 | | 7.88 |
| | | 15, 16 (Normal Colon vs. Colon Tumor Tissue) | 11 | 2 | 5.81 | |
| 1463 | 549864 | 16, 17 (Colon Tumor Tissue vs. Colon Metastasis) | 0 | 6 | | 5.91 |
| 1464 | 449836 | 15, 17 (Normal Colon Tissue vs. Colon Metastasis) | 8 | 1 | 8.59 | |
| 1465 | 554812 | 16, 17 (Colon Tumor Tissue vs. Colon Metastasis) | 1 | 8 | | 7.88 |
| | | 15, 17 (Normal Colon Tissue vs. Colon Metastasis) | 0 | 8 | | 7.45 |
| 1466 | 3316 | 16, 17 (Colon Tumor Tissue vs. Colon Metastasis) | 0 | 6 | | 5.91 |
| 1467 | 649852 | 15, 17 (Normal Colon Tissue vs. Colon Metastasis) | 6 | 0 | 6.44 | |
| 1468 | 453592 | 15, 16 (Normal Colon vs. Colon Tumor Tissue) | 19 | 6 | 3.35 | |
| 1469 | 455096 | 15, 17 (Normal Colon Tissue vs. Colon Metastasis) | 1 | 10 | | 9.32 |
| | | 16, 17 (Colon Tumor Tissue vs. Colon Metastasis) | 2 | 10 | | 4.92 |
| 1470 | 446199 | 16, 17 (Colon Tumor Tissue vs. Colon Metastasis) | 1 | 8 | | 7.88 |
| 1471 | 558427 | 15, 16 (Normal Colon vs. Colon Tumor Tissue) | 4 | 15 | | 3.55 |
| 1472 | 450255 | 16, 17 (Colon Tumor Tissue vs. Colon Metastasis) | 0 | 6 | | 5.91 |
| 1473 | 452026 | 15, 16 (Normal Colon vs. Colon Tumor Tissue) | 35 | 14 | 2.64 | |
| 1474 | 374971 | 16, 17 (Colon Tumor Tissue vs. Colon Metastasis) | 1 | 8 | | 7.88 |
| | | 08, 09 (Lung, High Met vs. Lung, Low Met) | 0 | 16 | | 11.45 |
| | | 15, 17 (Normal Colon Tissue vs. Colon Metastasis) | 0 | 8 | | 7.45 |
| 1475 | 446404 | 15, 17 (Normal Colon Tissue vs. Colon Metastasis) | 73 | 0 | 78.36 | |
| | | 18, 20 (Normal Colon Tissue vs. Colon Metastasis) | 23 | 0 | 19.66 | |
| | | 15, 16 (Normal Colon vs. Colon Tumor Tissue) | 73 | 1 | 77.16 | |
| | | 18, 19 (Normal Colon Tissue vs. Colon Tumor) | 23 | 0 | 26.28 | |
| 1476 | 549591 | 16, 17 (Colon Tumor Tissue vs. Colon Metastasis) | 7 | 24 | | 3.38 |
| | | 15, 17 (Normal Colon Tissue vs. Colon Metastasis) | 2 | 24 | | 11.18 |
| 1477 | 640135 | 15, 17 (Normal Colon Tissue vs. Colon Metastasis) | 8 | 0 | 8.59 | |
| | | 16, 17 (Colon Tumor Tissue vs. Colon Metastasis) | 6 | 0 | 6.09 | |
| 1478 | 646248 | 16, 17 (Colon Tumor Tissue vs. Colon Metastasis) | 6 | 0 | 6.09 | |
| 1479 | 639705 | 15, 17 (Normal Colon Tissue vs. Colon Metastasis) | 10 | 0 | 10.73 | |
| | | 15, 16 (Normal Colon vs. Colon Tumor Tissue) | 10 | 0 | 10.57 | |
| 1480 | 483084 | 16, 17 (Colon Tumor Tissue vs. Colon Metastasis) | 7 | 0 | 7.11 | |
| 1481 | 464029 | 16, 17 (Colon Tumor Tissue vs. Colon Metastasis) | 1 | 9 | | 8.86 |
| 1482 | 428005 | 15, 17 (Normal Colon Tissue vs. Colon Metastasis) | 0 | 8 | | 7.45 |
| | | 16, 17 (Colon Tumor Tissue vs. Colon Metastasis) | 0 | 8 | | 7.88 |
| 1483 | 91178 | 15, 17 (Normal Colon Tissue vs. Colon Metastasis) | 0 | 7 | | 6.52 |
| 1484 | 550571 | 16, 17 (Colon Tumor Tissue vs. Colon Metastasis) | 0 | 6 | | 5.91 |
| 1485 | 735028 | 15, 16 (Normal Colon vs. Colon Tumor Tissue) | 0 | 6 | | 5.68 |
| | | 16, 17 (Colon Tumor Tissue vs. Colon Metastasis) | 6 | 0 | 6.09 | |
| 1486 | 559409 | 16, 17 (Colon Tumor Tissue vs. Colon Metastasis) | 0 | 6 | | 5.91 |
| 1487 | 551172 | 15, 16 (Normal Colon vs. Colon Tumor Tissue) | 1 | 10 | | 9.46 |
| 1488 | 648872 | 15, 16 (Normal Colon vs. Colon Tumor Tissue) | 6 | 0 | 6.34 | |
| | | 15, 17 (Normal Colon Tissue vs. Colon Metastasis) | 6 | 0 | 6.44 | |
| 1489 | 446404 | 18, 19 (Normal Colon Tissue vs. Colon Tumor) | 23 | 0 | 26.28 | |
| | | 18, 20 (Normal Colon Tissue vs. Colon Metastasis) | 23 | 0 | 19.66 | |
| | | 15, 16 (Normal Colon vs. Colon Tumor Tissue) | 73 | 1 | 77.16 | |
| | | 15, 17 (Normal Colon Tissue vs. Colon Metastasis) | 73 | 0 | 78.36 | |
| 1490 | 734063 | 16, 17 (Colon Tumor Tissue vs. Colon Metastasis) | 7 | 0 | 7.11 | |
| | | 15, 16 (Normal Colon vs. Colon Tumor Tissue) | 0 | 7 | | 6.62 |
| 1491 | 467991 | 15, 16 (Normal Colon vs. Colon Tumor Tissue) | 7 | 0 | 7.4 | |
| 1492 | 454050 | 15, 17 (Normal Colon Tissue vs. Colon Metastasis) | 8 | 1 | 8.59 | |
| 1493 | 734646 | 15, 16 (Normal Colon vs. Colon Tumor Tissue) | 0 | 14 | | 13.25 |
| | | 16, 17 (Colon Tumor Tissue vs. Colon Metastasis) | 14 | 0 | 14.22 | |
| 1494 | 450192 | 16, 17 (Colon Tumor Tissue vs. Colon Metastasis) | 0 | 7 | | 6.89 |
| 1495 | 403978 | 23, 24 (Normal Lung Tissue vs. Lung Tumor Tissue) | 23 | 50 | | 2.15 |
| | | 15, 16 (Normal Colon vs. Colon Tumor Tissue) | 7 | 19 | | 2.57 |
| 1496 | 734209 | 16, 17 (Colon Tumor Tissue vs. Colon Metastasis) | 9 | 0 | 9.14 | |
| | | 15, 16 (Normal Colon vs. Colon Tumor Tissue) | 0 | 9 | | 8.51 |
| 1497 | 14805 | 16, 17 (Colon Tumor Tissue vs. Colon Metastasis) | 2 | 10 | | 4.92 |
| 1498 | 230995 | 15, 16 (Normal Colon vs. Colon Tumor Tissue) | 0 | 7 | | 6.62 |
| 1499 | 120049 | 15, 17 (Normal Colon Tissue vs. Colon Metastasis) | 10 | 2 | 5.37 | |
| 1500 | 642142 | 16, 17 (Colon Tumor Tissue vs. Colon Metastasis) | 11 | 0 | 11.17 | |
| | | 15, 16 (Normal Colon vs. Colon Tumor Tissue) | 2 | 11 | | 5.2 |
| 1501 | 403978 | 15, 16 (Normal Colon vs. Colon Tumor Tissue) | 7 | 19 | | 2.57 |
| | | 23, 24 (Normal Lung Tissue vs. Lung Tumor Tissue) | 23 | 50 | | 2.15 |
| 1502 | 386543 | 15, 17 (Normal Colon Tissue vs. Colon Metastasis) | 3 | 23 | | 7.14 |
| | | 16, 17 (Colon Tumor Tissue vs. Colon Metastasis) | 3 | 23 | | 7.55 |
| 1503 | 379105 | 15, 16 (Normal Colon vs. Colon Tumor Tissue) | 0 | 8 | | 7.57 |
| 1504 | 450255 | 16, 17 (Colon Tumor Tissue vs. Colon Metastasis) | 0 | 6 | | 5.91 |
| 1505 | 730143 | 15, 16 (Normal Colon vs. Colon Tumor Tissue) | 0 | 7 | | 6.62 |
| | | 16, 17 (Colon Tumor Tissue vs. Colon Metastasis) | 7 | 0 | 7.11 | |
| 1506 | 734209 | 15, 16 (Normal Colon vs. Colon Tumor Tissue) | 0 | 9 | | 8.51 |
| | | 16, 17 (Colon Tumor Tissue vs. Colon Metastasis) | 9 | 0 | 9.14 | |
| 1507 | 401553 | 15, 17 (Normal Colon Tissue vs. Colon Metastasis) | 8 | 0 | 8.59 | |
| 1508 | 72979 | 18, 19 (Normal Colon Tissue vs. Colon Tumor) | 1 | 36 | | 31.5 |
| | | 19, 20 (Colon Tumor Tissue vs. Colon Metastasis) | 36 | 4 | 6.73 | |
| | | 15, 17 (Normal Colon Tissue vs. Colon Metastasis) | 46 | 311 | | 6.3 |
| | | 08, 09 (Lung, High Met vs. Lung, Low Met) | 18 | 0 | 25.15 | |
| | | 15, 16 (Normal Colon vs. Colon Tumor Tissue) | 46 | 193 | | 3.97 |
| 1509 | 726307 | 16, 17 (Colon Tumor Tissue vs. Colon Metastasis) | 6 | 0 | 6.09 | |
| | | 15, 16 (Normal Colon vs. Colon Tumor Tissue) | 0 | 6 | | 5.68 |
| 1510 | 230995 | 15, 16 (Normal Colon vs. Colon Tumor Tissue) | 0 | 7 | | 6.62 |
| 1511 | 3524 | 01, 02 (Colon, High Met vs. Colon, Low Met) | 21 | 6 | 3.23 | |
| 1512 | 8112 | 03, 04 (Breast, High Met vs. Breast, Non-Met) | 8 | 0 | 7.81 | |
| 1513 | 5240 | 08, 09 (Lung, High Met vs. Lung, Low Met) | 18 | 10 | 2.52 | |
| | | 03, 04 (Breast, High Met vs. Breast, Non-Met) | 12 | 2 | 5.85 | |
| 1514 | 447326 | 15, 17 (Normal Colon Tissue vs. Colon Metastasis) | 6 | 0 | 6.44 | |
| 1515 | 2676 | 01, 02 (Colon, High Met vs. Colon, Low Met) | 2 | 17 | | 9.22 |
| 1516 | 736701 | 23, 24 (Normal Lung Tissue vs. Lung Tumor Tissue) | 10 | 0 | 10.1 | |
| | | 15, 16 (Normal Colon vs. Colon Tumor Tissue) | 0 | 6 | | 5.68 |
| | | 16, 17 (Colon Tumor Tissue vs. Colon Metastasis) | 6 | 0 | 6.09 | |
| 1517 | 736701 | 15, 16 (Normal Colon vs. Colon Tumor Tissue) | 0 | 6 | | 5.68 |
| | | 23, 24 (Normal Lung Tissue vs. Lung Tumor Tissue) | 10 | 0 | 10.1 | |
| | | 16, 17 (Colon Tumor Tissue vs. Colon Metastasis) | 6 | 0 | 6.09 | |
| 1518 | 8371 | 01, 02 (Colon, High Met vs. Colon, Low Met) | 0 | 6 | | 6.5 |
| 1520 | 185542 | 03, 04 (Breast, High Met vs. Breast, Non-Met) | 0 | 10 | | 10.25 |
| 1521 | 448046 | 15, 17 (Normal Colon Tissue vs. Colon Metastasis) | 0 | 12 | | 11.18 |
| | | 16, 17 (Colon Tumor Tissue vs. Colon Metastasis) | 3 | 12 | | 3.94 |
| 1522 | 185422 | 03, 04 (Breast, High Met vs. Breast, Non-Met) | 0 | 32 | | 32.8 |
| 1523 | 650448 | 15, 17 (Normal Colon Tissue vs. Colon Metastasis) | 7 | 0 | 7.51 | |
| 1524 | 5753 | 01, 02 (Colon, High Met vs. Colon, Low Met) | 0 | 10 | | 10.84 |
| 1526 | 1644 | 03, 04 (Breast, High Met vs. Breast, Non-Met) | 27 | 57 | | 2.16 |
| | | 01, 02 (Colon, High Met vs. Colon, Low Met) | 11 | 33 | | 3.25 |
| 1527 | 4453 | 03, 04 (Breast, High Met vs. Breast, Non-Met) | 10 | 2 | 4.88 | |
| 1528 | 454152 | 15, 16 (Normal Colon vs. Colon Tumor Tissue) | 11 | 3 | 3.88 | |
| | | 15, 17 (Normal Colon Tissue vs. Colon Metastasis) | 11 | 1 | 11.81 | |
| 1529 | 9913 | 03, 04 (Breast, High Met vs. Breast, Non-Met) | 7 | 0 | 6.83 | |
| 1530 | 1350 | 01, 02 (Colon, High Met vs. Colon, Low Met) | 3 | 44 | | 15.9 |
| 1531 | 188 | 03, 04 (Breast, High Met vs. Breast, Non-Met) | 129 | 309 | | 2.46 |
| | | 21, 22 (Normal Prostate vs. Prostate Cancer) | 71 | 166 | | 2.38 |
| 1532 | 4471 | 03, 04 (Breast, High Met vs. Breast, Non-Met) | 10 | 1 | 9.76 | |
| 1533 | 2622 | 03, 04 (Breast, High Met vs. Breast, Non-Met) | 7 | 31 | | 4.54 |
| 1534 | 185465 | 23, 24 (Normal Lung Tissue vs. Lung Tumor Tissue) | 25 | 9 | 2.81 | |
| | | 16, 17 (Colon Tumor Tissue vs. Colon Metastasis) | 4 | 14 | | 3.45 |
| | | 03, 04 (Breast, High Met vs. Breast, Non-Met) | 2 | 14 | | 7.17 |
| 1535 | 19205 | 03, 04 (Breast, High Met vs. Breast, Non-Met) | 0 | 6 | | 6.15 |
| 1536 | 185635 | 03, 04 (Breast, High Met vs. Breast, Non-Met) | 0 | 7 | | 7.17 |
| 1537 | 5289 | 03, 04 (Breast, High Met vs. Breast, Non-Met) | 19 | 2 | 9.27 | |
| 1538 | 779 | 01, 02 (Colon, High Met vs. Colon, Low Met) | 27 | 54 | | 2.17 |
| | | 03, 04 (Breast, High Met vs. Breast, Non-Met) | 60 | 22 | 2.66 | |
| 1539 | 779 | 01, 02 (Colon, High Met vs. Colon, Low Met) | 27 | 54 | | 2.17 |
| | | 03, 04 (Breast, High Met vs. Breast, Non-Met) | 60 | 22 | 2.66 | |
| 1540 | 5289 | 03, 04 (Breast, High Met vs. Breast, Non-Met) | 19 | 2 | 9.27 | |
| 1541 | 456808 | 15, 16 (Normal Colon vs. Colon Tumor Tissue) | 7 | 42 | | 5.68 |
| | | 16, 17 (Colon Tumor Tissue vs. Colon Metastasis) | 42 | 1 | 42.65 | |
| 1543 | 546642 | 16, 17 (Colon Tumor Tissue vs. Colon Metastasis) | 11 | 0 | 11.17 | |
| 1544 | 649732 | 16, 17 (Colon Tumor Tissue vs. Colon Metastasis) | 7 | 0 | 7.11 | |
| 1545 | 5240 | 03, 04 (Breast, High Met vs. Breast, Non-Met) | 12 | 2 | 5.85 | |
| | | 08, 09 (Lung, High Met vs. Lung, Low Met) | 18 | 10 | 2.52 | |
| 1546 | 448046 | 15, 17 (Normal Colon Tissue vs. Colon Metastasis) | 0 | 12 | | 11.18 |
| | | 16, 17 (Colon Tumor Tissue vs. Colon Metastasis) | 3 | 12 | | 3.94 |
| 1547 | 650476 | 15, 17 (Normal Colon Tissue vs. Colon Metastasis) | 7 | 0 | 7.51 | |
| 1548 | 379341 | 08, 09 (Lung, High Met vs. Lung, Low Met) | 2 | 21 | | 7.51 |
| | | 15, 17 (Normal Colon Tissue vs. Colon Metastasis) | 3 | 14 | | 4.35 |
| 1549 | 401849 | 16, 17 (Colon Tumor Tissue vs. Colon Metastasis) | 0 | 15 | | 14.77 |
| | | 15, 16 (Normal Colon vs. Colon Tumor Tissue) | 7 | 0 | 7.4 | |
| 1550 | 11452 | 01, 02 (Colon, High Met vs. Colon, Low Met) | 0 | 6 | | 6.5 |
| 1551 | 185417 | 08, 09 (Lung, High Met vs. Lung, Low Met) | 8 | 56 | | 5.01 |
| | | 03, 04 (Breast, High Met vs. Breast, Non-Met) | 4 | 32 | | 8.2 |
| 1552 | 4471 | 03, 04 (Breast, High Met vs. Breast, Non-Met) | 10 | 1 | 9.76 | |
| 1553 | 2557 | 01, 02 (Colon, High Met vs. Colon, Low Met) | 23 | 8 | 2.65 | |
| 1554 | 3656 | 01, 02 (Colon, High Met vs. Colon, Low Met) | 2 | 12 | | 6.5 |
| 1555 | 2327 | 03, 04 (Breast, High Met vs. Breast, Non-Met) | 8 | 19 | | 2.43 |
| | | 08, 09 (Lung, High Met vs. Lung, Low Met) | 10 | 2 | 6.99 | |
| 1556 | 449026 | 15, 17 (Normal Colon Tissue vs. Colon Metastasis) | 10 | 2 | 5.37 | |
| 1557 | 730227 | 16, 17 (Colon Tumor Tissue vs. Colon Metastasis) | 6 | 0 | 6.09 | |
| | | 15, 16 (Normal Colon vs. Colon Tumor Tissue) | 0 | 6 | | 5.68 |
| 1558 | 650864 | 15, 16 (Normal Colon vs. Colon Tumor Tissue) | 8 | 0 | 8.46 | |
| | | 15, 17 (Normal Colon Tissue vs. Colon Metastasis) | 8 | 0 | 8.59 | |
| 1559 | 530774 | 15, 17 (Normal Colon Tissue vs. Colon Metastasis) | 5 | 16 | | 2.98 |
| 1560 | 395341 | 15, 16 (Normal Colon vs. Colon Tumor Tissue) | 0 | 7 | | 6.62 |
| 1561 | 557906 | 15, 16 (Normal Colon vs. Colon Tumor Tissue) | 12 | 3 | 4.23 | |
| 1562 | 452531 | 15, 16 (Normal Colon vs. Colon Tumor Tissue) | 2 | 11 | | 5.2 |
| 1563 | 559057 | 15, 17 (Normal Colon Tissue vs. Colon Metastasis) | 0 | 7 | | 6.52 |
| 1564 | 448046 | 15, 17 (Normal Colon Tissue vs. Colon Metastasis) | 0 | 12 | | 11.18 |
| | | 16, 17 (Colon Tumor Tissue vs. Colon Metastasis) | 3 | 12 | | 3.94 |
| 1565 | 553547 | 16, 17 (Colon Tumor Tissue vs. Colon Metastasis) | 0 | 6 | | 5.91 |
| 1566 | 4636 | 03, 04 (Breast, High Met vs. Breast, Non-Met) | 3 | 15 | | 5.12 |
| 1567 | 455601 | 15, 17 (Normal Colon Tissue vs. Colon Metastasis) | 10 | 0 | 10.73 | |
| | | 16, 17 (Colon Tumor Tissue vs. Colon Metastasis) | 8 | 0 | 8.12 | |
| 1568 | 172013 | 15, 16 (Normal Colon vs. Colon Tumor Tissue) | 6 | 0 | 6.34 | |
| 1569 | 552597 | 15, 17 (Normal Colon Tissue vs. Colon Metastasis) | 0 | 7 | | 6.52 |
| 1570 | 446531 | 16, 17 (Colon Tumor Tissue vs. Colon Metastasis) | 0 | 6 | | 5.91 |
| 1571 | 639352 | 15, 17 (Normal Colon Tissue vs. Colon Metastasis) | 7 | 0 | 7.51 | |
| | | 15, 16 (Normal Colon vs. Colon Tumor Tissue) | 7 | 0 | 7.4 | |
| 1572 | 642604 | 15, 17 (Normal Colon Tissue vs. Colon Metastasis) | 10 | 0 | 10.73 | |
| | | 16, 17 (Colon Tumor Tissue vs. Colon Metastasis) | 13 | 0 | 13.2 | |
| 1573 | 558534 | 16, 17 (Colon Tumor Tissue vs. Colon Metastasis) | 0 | 7 | | 6.89 |
| 1574 | 556421 | 15, 16 (Normal Colon vs. Colon Tumor Tissue) | 12 | 1 | 12.68 | |
| 1575 | 735477 | 15, 16 (Normal Colon vs. Colon Tumor Tissue) | 0 | 7 | | 6.62 |
| | | 16, 17 (Colon Tumor Tissue vs. Colon Metastasis) | 7 | 0 | 7.11 | |
| 1576 | 640703 | 16, 17 (Colon Tumor Tissue vs. Colon Metastasis) | 10 | 0 | 10.16 | |
| 1577 | 643878 | 15, 17 (Normal Colon Tissue vs. Colon Metastasis) | 8 | 0 | 8.59 | |
| 1578 | 557797 | 16, 17 (Colon Tumor Tissue vs. Colon Metastasis) | 3 | 16 | | 5.25 |
| 1579 | 557200 | 16, 17 (Colon Tumor Tissue vs. Colon Metastasis) | 1 | 10 | | 9.85 |
| | | 15, 17 (Normal Colon Tissue vs. Colon Metastasis) | 1 | 10 | | 9.32 |
| 1580 | 729531 | 15, 16 (Normal Colon vs. Colon Tumor Tissue) | 0 | 6 | | 5.68 |
| | | 16, 17 (Colon Tumor Tissue vs. Colon Metastasis) | 6 | 0 | 6.09 | |
| 1581 | 734554 | 15, 16 (Normal Colon vs. Colon Tumor Tissue) | 0 | 6 | | 5.68 |
| | | 16, 17 (Colon Tumor Tissue vs. Colon Metastasis) | 6 | 0 | 6.09 | |
| 1582 | 418008 | 15, 17 (Normal Colon Tissue vs. Colon Metastasis) | 0 | 7 | | 6.52 |
| 1583 | 558614 | 16, 17 (Colon Tumor Tissue vs. Colon Metastasis) | 1 | 9 | | 8.86 |
| 1584 | 452245 | 15, 17 (Normal Colon Tissue vs. Colon Metastasis) | 1 | 12 | | 11.18 |
| | | 16, 17 (Colon Tumor Tissue vs. Colon Metastasis) | 1 | 12 | | 11.82 |
| 1585 | 449891 | 15, 16 (Normal Colon vs. Colon Tumor Tissue) | 8 | 1 | 8.46 | |
| 1587 | 6162 | 03, 04 (Breast, High Met vs. Breast, Non-Met) | 13 | 0 | 12.68 | |
| 1588 | 6162 | 03, 04 (Breast, High Met vs. Breast, Non-Met) | 13 | 0 | 12.68 | |
| 1589 | 4809 | 08, 09 (Lung, High Met vs. Lung, Low Met) | 3 | 27 | | 6.44 |
| | | 01, 02 (Colon, High Met vs. Colon, Low Met) | 15 | 1 | 13.84 | |
| 1590 | 3926 | 03, 04 (Breast, High Met vs. Breast, Non-Met) | 0 | 9 | | 9.22 |
| 1591 | 185693 | 03, 04 (Breast, High Met vs. Breast, Non-Met) | 0 | 6 | | 6.15 |
| 1592 | 641683 | 15, 17 (Normal Colon Tissue vs. Colon Metastasis) | 8 | 0 | 8.59 | |
| | | 15, 16 (Normal Colon vs. Colon Tumor Tissue) | 8 | 0 | 8.46 | |
| 1593 | 11351 | 01, 02 (Colon, High Met vs. Colon, Low Met) | 0 | 6 | | 6.5 |
| 1594 | 650864 | 15, 17 (Normal Colon Tissue vs. Colon Metastasis) | 8 | 0 | 8.59 | |
| | | 15, 16 (Normal Colon vs. Colon Tumor Tissue) | 8 | 0 | 8.46 | |
| 1595 | 460445 | 16, 17 (Colon Tumor Tissue vs. Colon Metastasis) | 0 | 6 | | 5.91 |
| 1596 | 447669 | 15, 16 (Normal Colon vs. Colon Tumor Tissue) | 4 | 16 | | 3.78 |
| 1597 | 227936 | 15, 16 (Normal Colon vs. Colon Tumor Tissue) | 0 | 8 | | 7.57 |
| 1598 | 639459 | 16, 17 (Colon Tumor Tissue vs. Colon Metastasis) | 9 | 0 | 9.14 | |
| | | 15, 17 (Normal Colon Tissue vs. Colon Metastasis) | 11 | 0 | 11.81 | |
| 1599 | 650195 | 15, 17 (Normal Colon Tissue vs. Colon Metastasis) | 6 | 0 | 6.44 | |
| | | 15, 16 (Normal Colon vs. Colon Tumor Tissue) | 6 | 0 | 6.34 | |
| 1600 | 734793 | 16, 17 (Colon Tumor Tissue vs. Colon Metastasis) | 9 | 0 | 9.14 | |
| | | 15, 16 (Normal Colon vs. Colon Tumor Tissue) | 0 | 9 | | 8.51 |
| 1601 | 540787 | 15, 17 (Normal Colon Tissue vs. Colon Metastasis) | 7 | 0 | 7.51 | |
| | | 15, 16 (Normal Colon vs. Colon Tumor Tissue) | 7 | 0 | 7.4 | |
| 1602 | 400654 | 16, 17 (Colon Tumor Tissue vs. Colon Metastasis) | 1 | 8 | | 7.88 |
| 1603 | 731467 | 15, 16 (Normal Colon vs. Colon Tumor Tissue) | 0 | 6 | | 5.68 |
| | | 16, 17 (Colon Tumor Tissue vs. Colon Metastasis) | 6 | 0 | 6.09 | |
| 1604 | 4045 | 03, 04 (Breast, High Met vs. Breast, Non-Met) | 10 | 1 | 9.76 | |
| | | 01, 02 (Colon, High Met vs. Colon, Low Met) | 2 | 11 | | 5.96 |
| 1605 | 447669 | 15, 16 (Normal Colon vs. Colon Tumor Tissue) | 4 | 16 | | 3.78 |
| 1606 | 11351 | 01, 02 (Colon, High Met vs. Colon, Low Met) | 0 | 6 | | 6.5 |
| 1607 | 648931 | 15, 17 (Normal Colon Tissue vs. Colon Metastasis) | 9 | 0 | 9.66 | |
| 1608 | 726786 | 16, 17 (Colon Tumor Tissue vs. Colon Metastasis) | 8 | 0 | 8.12 | |
| | | 15, 16 (Normal Colon vs. Colon Tumor Tissue) | 0 | 8 | | 7.57 |
| 1609 | 4508 | 01, 02 (Colon, High Met vs. Colon, Low Met) | 1 | 12 | | 13.01 |
| 1610 | 415058 | 16, 17 (Colon Tumor Tissue vs. Colon Metastasis) | 0 | 6 | | 5.91 |
| 1611 | 450633 | 15, 16 (Normal Colon vs. Colon Tumor Tissue) | 34 | 13 | 2.76 | |
| | | 15, 17 (Normal Colon Tissue vs. Colon Metastasis) | 34 | 7 | 5.21 | |
| 1612 | 736955 | 15, 16 (Normal Colon vs. Colon Tumor Tissue) | 0 | 13 | | 12.3 |
| | | 16, 17 (Colon Tumor Tissue vs. Colon Metastasis) | 13 | 0 | 13.2 | |
| 1613 | 729851 | 16, 17 (Colon Tumor Tissue vs. Colon Metastasis) | 7 | 0 | 7.11 | |
| | | 15, 16 (Normal Colon vs. Colon Tumor Tissue) | 0 | 7 | | 6.62 |
| 1614 | 2512 | 03, 04 (Breast, High Met vs. Breast, Non-Met) | 7 | 0 | 6.83 | |
| 1615 | 452704 | 15, 16 (Normal Colon vs. Colon Tumor Tissue) | 10 | 1 | 10.57 | |
| 1616 | 4589 | 01, 02 (Colon, High Met vs. Colon, Low Met) | 14 | 2 | 6.46 | |
| 1617 | 4727 | 03, 04 (Breast, High Met vs. Breast, Non-Met) | 19 | 0 | 18.54 | |
| 1618 | 454380 | 15, 16 (Normal Colon vs. Colon Tumor Tissue) | 3 | 14 | | 4.42 |
| 1619 | 553912 | 16, 17 (Colon Tumor Tissue vs. Colon Metastasis) | 0 | 7 | | 6.89 |
| | | 15, 17 (Normal Colon Tissue vs. Colon Metastasis) | 0 | 7 | | 6.52 |
| 1620 | 450004 | 15, 16 (Normal Colon vs. Colon Tumor Tissue) | 0 | 13 | | 12.3 |
| | | 16, 17 (Colon Tumor Tissue vs. Colon Metastasis) | 13 | 2 | 6.6 | |
| 1621 | 448193 | 16, 17 (Colon Tumor Tissue vs. Colon Metastasis) | 10 | 2 | 5.08 | |
| | | 15, 16 (Normal Colon vs. Colon Tumor Tissue) | 1 | 10 | | 9.46 |
| 1622 | 549591 | 15, 17 (Normal Colon Tissue vs. Colon Metastasis) | 2 | 24 | | 11.18 |
| | | 16, 17 (Colon Tumor Tissue vs. Colon Metastasis) | 7 | 24 | | 3.38 |
| 1623 | 448511 | 15, 17 (Normal Colon Tissue vs. Colon Metastasis) | 3 | 26 | | 8.07 |
| | | 16, 17 (Colon Tumor Tissue vs. Colon Metastasis) | 4 | 26 | | 6.4 |
| 1624 | 335 | 13, 14 (bFGF Treated HMVEC vs. VEGF-Treated HMVEC) | 3 | 15 | | 4.92 |
| | | 15, 16 (Normal Colon vs. Colon Tumor Tissue) | 12 | 38 | | 3 |
| | | 15, 17 (Normal Colon Tissue vs. Colon Metastasis) | 12 | 41 | | 3.18 |
| | | 18, 19 (Normal Colon Tissue vs. Colon Tumor) | 0 | 29 | | 25.38 |
| | | 19, 20 (Colon Tumor Tissue vs. Colon Metastasis) | 29 | 4 | 5.42 | |
| | | 12, 14 (Untreated HMVEC vs. VEGF-Treated HMVEC) (Untreated | 1 | 15 | | 14.69 |
| | | HMVEC vs. VEGF-Treated HMVEC) | | | | |
| 1625 | 561382 | 15, 16 (Normal Colon vs. Colon Tumor Tissue) | 12 | 2 | 6.34 | |
| 1626 | 3447 | 08, 09 (Lung, High Met vs. Lung, Low Met) | 0 | 13 | | 9.3 |
| | | 01, 02 (Colon, High Met vs. Colon, Low Met) | 2 | 16 | | 8.67 |
| 1627 | 639896 | 16, 17 (Colon Tumor Tissue vs. Colon Metastasis) | 8 | 0 | 8.12 | |
| 1628 | 1353 | 01, 02 (Colon, High Met vs. Colon, Low Met) | 39 | 13 | 2.77 | |
| | | 03, 04 (Breast, High Met vs. Breast, Non-Met) | 37 | 17 | 2.12 | |
| 1629 | 3031 | 01, 02 (Colon, High Met vs. Colon, Low Met) | 7 | 18 | | 2.79 |
| 1630 | 557928 | 16, 17 (Colon Tumor Tissue vs. Colon Metastasis) | 0 | 6 | | 5.91 |
| 1631 | 4727 | 03, 04 (Breast, High Met vs. Breast, Non-Met) | 19 | 0 | 18.54 | |
| 1632 | 4046 | 01, 02 (Colon, High Met vs. Colon, Low Met) | 4 | 14 | | 3.79 |
| 1633 | 10882 | 03, 04 (Breast, High Met vs. Breast, Non-Met) | 6 | 20 | | 3.42 |
| 1634 | 646283 | 15, 17 (Normal Colon Tissue vs. Colon Metastasis) | 9 | 0 | 9.66 | |
| | | 15, 16 (Normal Colon vs. Colon Tumor Tissue) | 9 | 0 | 9.51 | |
| 1635 | 646283 | 15, 16 (Normal Colon vs. Colon Tumor Tissue) | 9 | 0 | 9.51 | |
| | | 15, 17 (Normal Colon Tissue vs. Colon Metastasis) | 9 | 0 | 9.66 | |
| 1636 | 139516 | 03, 04 (Breast, High Met vs. Breast, Non-Met) | 0 | 7 | | 7.17 |
| 1637 | 6184 | 01, 02 (Colon, High Met vs. Colon, Low Met) | 0 | 8 | | 8.67 |
| 1638 | 6184 | 01, 02 (Colon, High Met vs. Colon, Low Met) | 0 | 8 | | 8.67 |
| 1639 | 454653 | 16, 17 (Colon Tumor Tissue vs. Colon Metastasis) | 5 | 17 | | 3.35 |
| | | 15, 17 (Normal Colon Tissue vs. Colon Metastasis) | 3 | 17 | | 5.28 |
| 1640 | 3309 | 03, 04 (Breast, High Met vs. Breast, Non-Met) | 9 | 0 | 8.78 | |
| | | 08, 09 (Lung, High Met vs. Lung, Low Met) | 10 | 38 | | 2.72 |
| 1641 | 1037 | 03, 04 (Breast, High Met vs. Breast, Non-Met) | 4 | 22 | | 5.64 |
| 1642 | 450665 | 16, 17 (Colon Tumor Tissue vs. Colon Metastasis) | 0 | 6 | | 5.91 |
| 1643 | 726307 | 16, 17 (Colon Tumor Tissue vs. Colon Metastasis) | 6 | 0 | 6.09 | |
| | | 15, 16 (Normal Colon vs. Colon Tumor Tissue) | 0 | 6 | | 5.68 |
| 1644 | 447669 | 15, 16 (Normal Colon vs. Colon Tumor Tissue) | 4 | 16 | | 3.78 |
| 1645 | 639651 | 15, 17 (Normal Colon Tissue vs. Colon Metastasis) | 6 | 0 | 6.44 | |
| 1646 | 736860 | 16, 17 (Colon Tumor Tissue vs. Colon Metastasis) | 6 | 0 | 6.09 | |
| | | 15, 16 (Normal Colon vs. Colon Tumor Tissue) | 0 | 6 | | 5.68 |
| 1647 | 553705 | 15, 16 (Normal Colon vs. Colon Tumor Tissue) | 12 | 0 | 12.68 | |
| 1648 | 451375 | 15, 16 (Normal Colon vs. Colon Tumor Tissue) | 2 | 11 | | 5.2 |
| 1649 | 204862 | 15, 16 (Normal Colon vs. Colon Tumor Tissue) | 6 | 0 | 6.34 | |
| 1650 | 530883 | 15, 16 (Normal Colon vs. Colon Tumor Tissue) | 0 | 7 | | 6.62 |
| 1651 | 447539 | 15, 16 (Normal Colon vs. Colon Tumor Tissue) | 8 | 1 | 8.46 | |
| | | 15, 17 (Normal Colon Tissue vs. Colon Metastasis) | 8 | 0 | 8.59 | |
| 1652 | 455096 | 16, 17 (Colon Tumor Tissue vs. Colon Metastasis) | 2 | 10 | | 4.92 |
| | | 15, 17 (Normal Colon Tissue vs. Colon Metastasis) | 1 | 10 | | 9.32 |
| 1654 | 449142 | 16, 17 (Colon Tumor Tissue vs. Colon Metastasis) | 9 | 1 | 9.14 | |
| 1655 | 557401 | 15, 17 (Normal Colon Tissue vs. Colon Metastasis) | 10 | 2 | 5.37 | |
| 1656 | 418763 | 15, 17 (Normal Colon Tissue vs. Colon Metastasis) | 9 | 0 | 9.66 | |
| 1657 | 17649 | 03, 04 (Breast, High Met vs. Breast, Non-Met) | 6 | 0 | 5.85 | |
| 1658 | 2078 | 03, 04 (Breast, High Met vs. Breast, Non-Met) | 11 | 2 | 5.37 | |
| 1659 | 640370 | 16, 17 (Colon Tumor Tissue vs. Colon Metastasis) | 7 | 0 | 7.11 | |
| | | 15, 17 (Normal Colon Tissue vs. Colon Metastasis) | 6 | 0 | 6.44 | |
| 1660 | 449269 | 15, 17 (Normal Colon Tissue vs. Colon Metastasis) | 26 | 7 | 3.99 | |
| | | 15, 16 (Normal Colon vs. Colon Tumor Tissue) | 26 | 5 | 5.5 | |
| 1661 | 639029 | 15, 17 (Normal Colon Tissue vs. Colon Metastasis) | 6 | 0 | 6.44 | |
| 1662 | 448677 | 15, 16 (Normal Colon vs. Colon Tumor Tissue) | 11 | 1 | 11.63 | |
| 1663 | 349 | 01, 02 (Colon, High Met vs. Colon, Low Met) | 69 | 138 | | 2.17 |
| | | 03, 04 (Breast, High Met vs. Breast, Non-Met) | 77 | 1 | 75.13 | |
| | | 15, 17 (Normal Colon Tissue vs. Colon Metastasis) | 0 | 7 | | 6.52 |
| 1664 | 447494 | 15, 16 (Normal Colon vs. Colon Tumor Tissue) | 26 | 8 | 3.44 | |
| 1665 | 551433 | 16, 17 (Colon Tumor Tissue vs. Colon Metastasis) | 0 | 8 | | 7.88 |
| 1666 | 414739 | 15, 17 (Normal Colon Tissue vs. Colon Metastasis) | 2 | 14 | | 6.52 |
| | | 16, 17 (Colon Tumor Tissue vs. Colon Metastasis) | 2 | 14 | | 6.89 |
| 1667 | 640525 | 15, 17 (Normal Colon Tissue vs. Colon Metastasis) | 7 | 0 | 7.51 | |
| | | 15, 16 (Normal Colon vs. Colon Tumor Tissue) | 7 | 0 | 7.4 | |
| 1668 | 640525 | 15, 17 (Normal Colon Tissue vs. Colon Metastasis) | 7 | 0 | 7.51 | |
| | | 15, 16 (Normal Colon vs. Colon Tumor Tissue) | 7 | 0 | 7.4 | |
| 1669 | 233108 | 15, 17 (Normal Colon Tissue vs. Colon Metastasis) | 11 | 0 | 11.81 | |
| | | 15, 16 (Normal Colon vs. Colon Tumor Tissue) | 11 | 0 | 11.63 | |
| 1670 | 643594 | 15, 17 (Normal Colon Tissue vs. Colon Metastasis) | 7 | 0 | 7.51 | |
| | | 15, 16 (Normal Colon vs. Colon Tumor Tissue) | 7 | 0 | 7.4 | |
| 1671 | 1642 | 03, 04 (Breast, High Met vs. Breast, Non-Met) | 28 | 5 | 5.46 | |
| 1672 | 643804 | 15, 17 (Normal Colon Tissue vs. Colon Metastasis) | 6 | 0 | 6.44 | |
| | | 15, 16 (Normal Colon vs. Colon Tumor Tissue) | 6 | 0 | 6.34 | |
| 1673 | 449701 | 15, 16 (Normal Colon vs. Colon Tumor Tissue) | 1 | 17 | | 16.08 |
| | | 16, 17 (Colon Tumor Tissue vs. Colon Metastasis) | 17 | 1 | 17.26 | |
| 1674 | 185695 | 03, 04 (Breast, High Met vs. Breast, Non-Met) | 0 | 6 | | 6.15 |
| 1675 | 555830 | 15, 16 (Normal Colon vs. Colon Tumor Tissue) | 16 | 2 | 8.46 | |
| | | 15, 17 (Normal Colon Tissue vs. Colon Metastasis) | 16 | 2 | 8.59 | |
| 1676 | 227936 | 15, 16 (Normal Colon vs. Colon Tumor Tissue) | 0 | 8 | | 7.57 |
| 1677 | 1609 | 01, 02 (Colon, High Met vs. Colon, Low Met) | 3 | 58 | | 20.96 |
| | | 15, 17 (Normal Colon Tissue vs. Colon Metastasis) | 15 | 3 | 5.37 | |
| | | 16, 17 (Colon Tumor Tissue vs. Colon Metastasis) | 14 | 3 | 4.74 | |
| | | 03, 04 (Breast, High Met vs. Breast, Non-Met) | 10 | 2 | 4.88 | |
| 1678 | 643938 | 15, 17 (Normal Colon Tissue vs. Colon Metastasis) | 7 | 0 | 7.51 | |
| | | 15, 16 (Normal Colon vs. Colon Tumor Tissue) | 7 | 0 | 7.4 | |
| 1679 | 3656 | 01, 02 (Colon, High Met vs. Colon, Low Met) | 2 | 12 | | 6.5 |
| 1680 | 16576 | 03, 04 (Breast, High Met vs. Breast, Non-Met) | 0 | 8 | | 8.2 |
| 1681 | 9784 | 03, 04 (Breast, High Met vs. Breast, Non-Met) | 0 | 6 | | 6.15 |
| 1682 | 2557 | 01, 02 (Colon, High Met vs. Colon, Low Met) | 23 | 8 | 2.65 | |
| 1683 | 4620 | 03, 04 (Breast, High Met vs. Breast, Non-Met) | 7 | 0 | 6.83 | |
| 1684 | 43642 | 16, 17 (Colon Tumor Tissue vs. Colon Metastasis) | 0 | 6 | | 5.91 |
| 1685 | 555103 | 23, 24 (Normal Lung Tissue vs. Lung Tumor Tissue) | 0 | 6 | | 5.94 |
| | | 15, 17 (Normal Colon Tissue vs. Colon Metastasis) | 0 | 7 | | 6.52 |
| 1686 | 643341 | 15, 16 (Normal Colon vs. Colon Tumor Tissue) | 8 | 0 | 8.46 | |
| | | 15, 17 (Normal Colon Tissue vs. Colon Metastasis) | 8 | 0 | 8.59 | |
| 1687 | 185531 | 03, 04 (Breast, High Met vs. Breast, Non-Met) | 1 | 9 | | 9.22 |
| | | 08, 09 (Lung, High Met vs. Lung, Low Met) | 0 | 13 | | 9.3 |
| 1688 | 4045 | 01, 02 (Colon, High Met vs. Colon, Low Met) | 2 | 11 | | 5.96 |
| | | 03, 04 (Breast, High Met vs. Breast, Non-Met) | 10 | 1 | 9.76 | |
| 1689 | 400258 | 16, 17 (Colon Tumor Tissue vs. Colon Metastasis) | 6 | 0 | 6.09 | |
| 1690 | 96618 | 03, 04 (Breast, High Met vs. Breast, Non-Met) | 4 | 13 | | 3.33 |
| 1691 | 646060 | 15, 17 (Normal Colon Tissue vs. Colon Metastasis) | 13 | 0 | 13.95 | |
| | | 15, 16 (Normal Colon vs. Colon Tumor Tissue) | 13 | 3 | 4.58 | |
| 1692 | 5665 | 03, 04 (Breast, High Met vs. Breast, Non-Met) | 13 | 0 | 12.68 | |
| 1693 | 149265 | 03, 04 (Breast, High Met vs. Breast, Non-Met) | 1 | 16 | | 16.4 |
| 1694 | 727314 | 15, 16 (Normal Colon vs. Colon Tumor Tissue) | 0 | 7 | | 6.62 |
| | | 16, 17 (Colon Tumor Tissue vs. Colon Metastasis) | 7 | 0 | 7.11 | |
| 1695 | 736349 | 15, 16 (Normal Colon vs. Colon Tumor Tissue) | 0 | 6 | | 5.68 |
| | | 16, 17 (Colon Tumor Tissue vs. Colon Metastasis) | 6 | 0 | 6.09 | |
| 1696 | 648931 | 15, 17 (Normal Colon Tissue vs. Colon Metastasis) | 9 | 0 | 9.66 | |
| 1697 | 553881 | 15, 16 (Normal Colon vs. Colon Tumor Tissue) | 15 | 4 | 3.96 | |
| 1698 | 7444 | 03, 04 (Breast, High Met vs. Breast, Non-Met) | 9 | 0 | 8.78 | |
| 1699 | 150 | 03, 04 (Breast, High Met vs. Breast, Non-Met) | 51 | 24 | 2.07 | |
| | | 08, 09 (Lung, High Met vs. Lung, Low Met) | 5 | 0 | 6.99 | |
| 1700 | 2889 | 01, 02 (Colon, High Met vs. Colon, Low Met) | 8 | 19 | | 2.57 |
| 1701 | 730670 | 16, 17 (Colon Tumor Tissue vs. Colon Metastasis) | 6 | 0 | 6.09 | |
| | | 15, 16 (Normal Colon vs. Colon Tumor Tissue) | 0 | 6 | | 5.68 |
| 1702 | 560984 | 16, 17 (Colon Tumor Tissue vs. Colon Metastasis) | 0 | 6 | | 5.91 |
| 1703 | 453708 | 16, 17 (Colon Tumor Tissue vs. Colon Metastasis) | 1 | 19 | | 18.71 |
| | | 15, 17 (Normal Colon Tissue vs. Colon Metastasis) | 1 | 19 | | 17.7 |
| 1704 | 48977 | 15, 17 (Normal Colon Tissue vs. Colon Metastasis) | 0 | 8 | | 7.45 |
| | | 16, 17 (Colon Tumor Tissue vs. Colon Metastasis) | 1 | 8 | | 7.88 |
| 1707 | 97507 | 15, 16 (Normal Colon vs. Colon Tumor Tissue) | 1 | 9 | | 8.51 |
| 1708 | 735966 | 15, 16 (Normal Colon vs. Colon Tumor Tissue) | 0 | 6 | | 5.68 |
| | | 16, 1 7 (Colon Tumor Tissue vs. Colon Metastasis) | 6 | 0 | 6.09 | |
| | | 23, 24 (Normal Lung Tissue vs. Lung Tumor Tissue) | 7 | 0 | 7.07 | |
| 1709 | 35 | 15, 17 (Normal Colon Tissue vs. Colon Metastasis) | 2 | 12 | | 5.59 |
| | | 03, 04 (Breast, High Met vs. Breast, Non-Met) | 386 | 1967 | | 5.22 |
| | | 08, 09 (Lung, High Met vs. Lung, Low Met) | 868 | 11 | 110.27 | |
| | | 15, 16 (Normal Colon vs. Colon Tumor Tissue) | 2 | 14 | | 6.62 |
| 1710 | 650195 | 15, 16 (Normal Colon vs. Colon Tumor Tissue) | 6 | 0 | 6.34 | |
| | | 15, 17 (Normal Colon Tissue vs. Colon Metastasis) | 6 | 0 | 6.44 | |
| 1711 | 639705 | 15, 16 (Normal Colon vs. Colon Tumor Tissue) | 10 | 0 | 10.57 | |
| | | 15, 17 (Normal Colon Tissue vs. Colon Metastasis) | 10 | 0 | 10.73 | |
| 1712 | 185465 | 16, 17 (Colon Tumor Tissue vs. Colon Metastasis) | 4 | 14 | | 3.45 |
| | | 03, 04 (Breast, High Met vs. Breast, Non-Met) | 2 | 14 | | 7.17 |
| | | 23, 24 (Normal Lung Tissue vs. Lung Tumor Tissue) | 25 | 9 | 2.81 | |
| 1713 | 378525 | 16, 17 (Colon Tumor Tissue vs. Colon Metastasis) | 9 | 1 | 9.14 | |
| 1714 | 2889 | 01, 02 (Colon, High Met vs. Colon, Low Met) | 8 | 19 | | 2.57 |
| 1715 | 557686 | 16, 17 (Colon Tumor Tissue vs. Colon Metastasis) | 0 | 6 | | 5.91 |
| 1716 | 735786 | 15, 16 (Normal Colon vs. Colon Tumor Tissue) | 0 | 7 | | 6.62 |
| | | 16, 17 (Colon Tumor Tissue vs. Colon Metastasis) | 7 | 0 | 7.11 | |
| 1717 | 455145 | 15, 17 (Normal Colon Tissue vs. Colon Metastasis) | 6 | 0 | 6.44 | |
| 1718 | 639667 | 16, 17 (Colon Tumor Tissue vs. Colon Metastasis) | 9 | 0 | 9.14 | |
| 1719 | 446913 | 18, 19 (Normal Colon Tissue vs. Colon Tumor) | 10 | 0 | 11.43 | |
| | | 15, 17 (Normal Colon Tissue vs. Colon Metastasis) | 63 | 0 | 67.62 | |
| | | 18, 20 (Normal Colon Tissue vs. Colon Metastasis) | 10 | 0 | 8.55 | |
| | | 15, 16 (Normal Colon vs. Colon Tumor Tissue) | 63 | 1 | 66.59 | |
| 1720 | 402494 | 15, 16 (Normal Colon vs. Colon Tumor Tissue) | 3 | 13 | | 4.1 |
| | | 16, 17 (Colon Tumor Tissue vs. Colon Metastasis) | 13 | 3 | 4.4 | |
| 1721 | 734256 | 15, 16 (Normal Colon vs. Colon Tumor Tissue) | 0 | 7 | | 6.62 |
| | | 16, 17 (Colon Tumor Tissue vs. Colon Metastasis) | 7 | 0 | 7.11 | |
| 1722 | 734256 | 16, 17 (Colon Tumor Tissue vs. Colon Metastasis) | 7 | 0 | 7.11 | |
| | | 15, 16 (Normal Colon vs. Colon Tumor Tissue) | 0 | 7 | | 6.62 |
| 1723 | 559362 | 16, 17 (Colon Tumor Tissue vs. Colon Metastasis) | 1 | 8 | | 7.88 |
| 1724 | 639651 | 15, 17 (Normal Colon Tissue vs. Colon Metastasis) | 6 | 0 | 6.44 | |
| 1725 | 419774 | 15, 17 (Normal Colon Tissue vs. Colon Metastasis) | 2 | 12 | | 5.59 |
| 1726 | 555318 | 16, 17 (Colon Tumor Tissue vs. Colon Metastasis) | 2 | 12 | | 5.91 |
| 1727 | 449956 | 16, 17 (Colon Tumor Tissue vs. Colon Metastasis) | 10 | 1 | 10.16 | |
| 1728 | 558427 | 15, 16 (Normal Colon vs. Colon Tumor Tissue) | 4 | 15 | | 3.55 |
| 1729 | 7531 | 01, 02 (Colon, High Met vs. Colon, Low Met) | 1 | 8 | | 8.67 |
| 1730 | 446514 | 16, 17 (Colon Tumor Tissue vs. Colon Metastasis) | 8 | 1 | 8.12 | |
| 1731 | 456808 | 16, 17 (Colon Tumor Tissue vs. Colon Metastasis) | 42 | 1 | 42.65 | |
| | | 15, 16 (Normal Colon vs. Colon Tumor Tissue) | 7 | 42 | | 5.68 |
| 1732 | 447035 | 16, 17 (Colon Tumor Tissue vs. Colon Metastasis) | 8 | 1 | 8.12 | |
| 1733 | 446913 | 15, 16 (Normal Colon vs. Colon Tumor Tissue) | 63 | 1 | 66.59 | |
| | | 15, 17 (Normal Colon Tissue vs. Colon Metastasis) | 63 | 0 | 67.62 | |
| | | 18, 19 (Normal Colon Tissue vs. Colon Tumor) | 10 | 0 | 11.43 | |
| | | 18, 20 (Normal Colon Tissue vs. Colon Metastasis) | 10 | 0 | 8.55 | |
| 1734 | 446900 | 16, 17 (Colon Tumor Tissue vs. Colon Metastasis) | 2 | 11 | | 5.42 |
| | | 15, 17 (Normal Colon Tissue vs. Colon Metastasis) | 1 | 11 | | 10.25 |
| 1735 | 504513 | 15, 17 (Normal Colon Tissue vs. Colon Metastasis) | 6 | 0 | 6.44 | |
| 1736 | 380477 | 15, 17 (Normal Colon Tissue vs. Colon Metastasis) | 7 | 0 | 7.51 | |
| 1738 | 8259 | 01, 02 (Colon, High Met vs. Colon, Low Met) | 10 | 0 | 9.22 | |
| | | 08, 09 (Lung, High Met vs. Lung, Low Met) | 13 | 49 | | 2.7 |
| 1739 | 8259 | 01, 02 (Colon, High Met vs. Colon, Low Met) | 10 | 0 | 9.22 | |
| | | 08, 09 (Lung, High Met vs. Lung, Low Met) | 13 | 49 | | 2.7 |
| 1740 | 552968 | 16, 17 (Colon Tumor Tissue vs. Colon Metastasis) | 0 | 9 | | 8.86 |
| | | 15, 17 (Normal Colon Tissue vs. Colon Metastasis) | 0 | 9 | | 8.38 |
| 1741 | 650845 | 16, 17 (Colon Tumor Tissue vs. Colon Metastasis) | 6 | 0 | 6.09 | |
| 1742 | 648594 | 15, 17 (Normal Colon Tissue vs. Colon Metastasis) | 10 | 0 | 10.73 | |
| 1743 | 648594 | 15, 17 (Normal Colon Tissue vs. Colon Metastasis) | 10 | 0 | 10.73 | |
| 1744 | 2796 | 03, 04 (Breast, High Met vs. Breast, Non-Met) | 8 | 37 | | 4.74 |
| 1745 | 5753 | 01, 02 (Colon, High Met vs. Colon, Low Met) | 0 | 10 | | 10.84 |
| 1746 | 734256 | 15, 16 (Normal Colon vs. Colon Tumor Tissue) | 0 | 7 | | 6.62 |
| | | 16, 17 (Colon Tumor Tissue vs. Colon Metastasis) | 7 | 0 | 7.11 | |
| 1747 | 449580 | 15, 16 (Normal Colon vs. Colon Tumor Tissue) | 16 | 4 | 4.23 | |
| 1748 | 553705 | 15, 16 (Normal Colon vs. Colon Tumor Tissue) | 12 | 0 | 12.68 | |
| 1749 | 730670 | 15, 16 (Normal Colon vs. Colon Tumor Tissue) | 0 | 6 | | 5.68 |
| | | 16, 17 (Colon Tumor Tissue vs. Colon Metastasis) | 6 | 0 | 6.09 | |
| 1750 | 15035 | 15, 16 (Normal Colon vs. Colon Tumor Tissue) | 8 | 0 | 8.46 | |
| | | 15, 17 (Normal Colon Tissue vs. Colon Metastasis) | 8 | 1 | 8.59 | |
| 1751 | 394436 | 15, 17 (Normal Colon Tissue vs. Colon Metastasis) | 7 | 0 | 7.51 | |
| 1752 | 726810 | 15, 16 (Normal Colon vs. Colon Tumor Tissue) | 0 | 7 | | 6.62 |
| | | 16, 17 (Colon Tumor Tissue vs. Colon Metastasis) | 7 | 0 | 7.11 | |
| 1753 | 352763 | 16, 17 (Colon Tumor Tissue vs. Colon Metastasis) | 1 | 10 | | 9.85 |
| 1754 | 3506 | 03, 04 (Breast, High Met vs. Breast, Non-Met) | 1 | 10 | | 10.25 |
| 1755 | 726377 | 16, 17 (Colon Tumor Tissue vs. Colon Metastasis) | 7 | 0 | 7.11 | |
| | | 15, 16 (Normal Colon vs. Colon Tumor Tissue) | 0 | 7 | | 6.62 |
| 1756 | 562111 | 16, 17 (Colon Tumor Tissue vs. Colon Metastasis) | 2 | 13 | | 6.4 |
| | | 15, 17 (Normal Colon Tissue vs. Colon Metastasis) | 2 | 13 | | 6.06 |
| 1757 | 404475 | 16, 17 (Colon Tumor Tissue vs. Colon Metastasis) | 11 | 2 | 5.59 | |
| | | 15, 17 (Normal Colon Tissue vs. Colon Metastasis) | 19 | 2 | 10.2 | |
| 1758 | 13824 | 03, 04 (Breast, High Met vs. Breast, Non-Met) | 6 | 0 | 5.85 | |
| 1759 | 558222 | 16, 17 (Colon Tumor Tissue vs. Colon Metastasis) | 0 | 6 | | 5.91 |
| 1760 | 2834 | 01, 02 (Colon, High Met vs. Colon, Low Met) | 8 | 22 | | 2.98 |
| 1761 | 453470 | 15, 16 (Normal Colon vs. Colon Tumor Tissue) | 12 | 1 | 12.68 | |
| | | 15, 17 (Normal Colon Tissue vs. Colon Metastasis) | 12 | 1 | 12.88 | |
| 1762 | 558682 | 16, 17 (Colon Tumor Tissue vs. Colon Metastasis) | 3 | 12 | | 3.94 |
| 1763 | 641710 | 15, 17 (Normal Colon Tissue vs. Colon Metastasis) | 6 | 0 | 6.44 | |
| 1764 | 640221 | 15, 17 (Normal Colon Tissue vs. Colon Metastasis) | 8 | 0 | 8.59 | |
| 1765 | 559057 | 15, 17 (Normal Colon Tissue vs. Colon Metastasis) | 0 | 7 | | 6.52 |
| 1766 | 551433 | 16, 17 (Colon Tumor Tissue vs. Colon Metastasis) | 0 | 8 | | 7.88 |
| 1767 | 5729 | 01, 02 (Colon, High Met vs. Colon, Low Met) | 1 | 10 | | 10.84 |
| 1768 | 352763 | 16, 17 (Colon Tumor Tissue vs. Colon Metastasis) | 1 | 10 | | 9.85 |
| 1769 | 375651 | 16, 17 (Colon Tumor Tissue vs. Colon Metastasis) | 8 | 0 | 8.12 | |
| 1770 | 644032 | 16, 17 (Colon Tumor Tissue vs. Colon Metastasis) | 124 | 0 | 125.92 | |
| | | 15, 17 (Normal Colon Tissue vs. Colon Metastasis) | 7 | 0 | 7.51 | |
| | | 15, 16 (Normal Colon vs. Colon Tumor Tissue) | 7 | 124 | | 16.76 |
| 1771 | 185562 | 03, 04 (Breast, High Met vs. Breast, Non-Met) | 0 | 9 | | 9.22 |
| 1772 | 736349 | 15, 16 (Normal Colon vs. Colon Tumor Tissue) | 0 | 6 | | 5.68 |
| | | 16, 17 (Colon Tumor Tissue vs. Colon Metastasis) | 6 | 0 | 6.09 | |
| 1773 | 638870 | 16, 17 (Colon Tumor Tissue vs. Colon Metastasis) | 11 | 0 | 11.17 | |
| 1774 | 649719 | 15, 17 (Normal Colon Tissue vs. Colon Metastasis) | 6 | 0 | 6.44 | |
| 1775 | 62016 | 16, 17 (Colon Tumor Tissue vs. Colon Metastasis) | 0 | 6 | | 5.91 |
| 1776 | 2889 | 01, 02 (Colon, High Met vs. Colon, Low Met) | 8 | 19 | | 2.57 |
| 1777 | 647135 | 15, 17 (Normal Colon Tissue vs. Colon Metastasis) | 7 | 0 | 7.51 | |
| 1778 | 8283 | 01, 02 (Colon, High Met vs. Colon, Low Met) | 0 | 8 | | 8.67 |
| 1779 | 732121 | 16, 17 (Colon Tumor Tissue vs. Colon Metastasis) | 7 | 0 | 7.11 | |
| | | 15, 16 (Normal Colon vs. Colon Tumor Tissue) | 0 | 7 | | 6.62 |
| 1780 | 532307 | 16, 17 (Colon Tumor Tissue vs. Colon Metastasis) | 0 | 7 | | 6.89 |
| 1781 | 6589 | 01, 02 (Colon, High Met vs. Colon, Low Met) | 1 | 9 | | 9.76 |
| 1782 | 554678 | 15, 16 (Normal Colon vs. Colon Tumor Tissue) | 10 | 2 | 5.28 | |
| 1783 | 450410 | 16, 17 (Colon Tumor Tissue vs. Colon Metastasis) | 0 | 7 | | 6.89 |
| 1784 | 643924 | 15, 16 (Normal Colon vs. Colon Tumor Tissue) | 6 | 0 | 6.34 | |
| | | 15, 17 (Normal Colon Tissue vs. Colon Metastasis) | 6 | 0 | 6.44 | |
| 1785 | 453719 | 16, 17 (Colon Tumor Tissue vs. Colon Metastasis) | 0 | 9 | | 8.86 |
| 1786 | 451811 | 15, 17 (Normal Colon Tissue vs. Colon Metastasis) | 10 | 2 | 5.37 | |
| 1787 | 453059 | 15, 17 (Normal Colon Tissue vs. Colon Metastasis) | 9 | 0 | 9.66 | |
| | | 15, 16 (Normal Colon vs. Colon Tumor Tissue) | 9 | 1 | 9.51 | |
| 1788 | 453457 | 16, 17 (Colon Tumor Tissue vs. Colon Metastasis) | 1 | 8 | | 7.88 |
| 1789 | 558454 | 15, 17 (Normal Colon Tissue vs. Colon Metastasis) | 0 | 7 | | 6.52 |
| 1790 | 417467 | 15, 17 (Normal Colon Tissue vs. Colon Metastasis) | 0 | 7 | | 6.52 |
| 1791 | 447850 | 16, 17 (Colon Tumor Tissue vs. Colon Metastasis) | 0 | 6 | | 5.91 |
| 1792 | 557948 | 16, 17 (Colon Tumor Tissue vs. Colon Metastasis) | 0 | 11 | | 10.83 |
| 1793 | 452685 | 15, 16 (Normal Colon vs. Colon Tumor Tissue) | 15 | 5 | 3.17 | |
| 1794 | 446964 | 15, 17 (Normal Colon Tissue vs. Colon Metastasis) | 1 | 10 | | 9.32 |
| 1795 | 550318 | 15, 16 (Normal Colon vs. Colon Tumor Tissue) | 15 | 3 | 5.28 | |
| 1796 | 407077 | 15, 17 (Normal Colon Tissue vs. Colon Metastasis) | 0 | 8 | | 7.45 |
| | | 16, 17 (Colon Tumor Tissue vs. Colon Metastasis) | 1 | 8 | | 7.88 |
| 1797 | 650864 | 15, 16 (Normal Colon vs. Colon Tumor Tissue) | 8 | 0 | 8.46 | |
| | | 15, 17 (Normal Colon Tissue vs. Colon Metastasis) | 8 | 0 | 8.59 | |
| 1798 | 644721 | 15, 17 (Normal Colon Tissue vs. Colon Metastasis) | 6 | 0 | 6.44 | |
| 1799 | 485431 | 15, 16 (Normal Colon vs. Colon Tumor Tissue) | 0 | 6 | | 5.68 |
| 1800 | 651073 | 15, 17 (Normal Colon Tissue vs. Colon Metastasis) | 7 | 0 | 7.51 | |
| | | 15, 16 (Normal Colon vs. Colon Tumor Tissue) | 7 | 0 | 7.4 | |
| 1801 | 725811 | 16, 17 (Colon Tumor Tissue vs. Colon Metastasis) | 6 | 0 | 6.09 | |
| | | 15, 16 (Normal Colon vs. Colon Tumor Tissue) | 0 | 6 | | 5.68 |
| 1802 | 645139 | 16, 17 (Colon Tumor Tissue vs. Colon Metastasis) | 9 | 0 | 9.14 | |
| 1803 | 185478 | 03, 04 (Breast, High Met vs. Breast, Non-Met) | 0 | 14 | | 14.35 |
| 1804 | 1441 | 01, 02 (Colon, High Met vs. Colon, Low Met) | 9 | 40 | | 4.82 |
| | | 03, 04 (Breast, High Met vs. Breast, Non-Met) | 38 | 16 | 2.32 | |
| 1805 | 640005 | 15, 16 (Normal Colon vs. Colon Tumor Tissue) | 20 | 6 | 3.52 | |
| | | 16, 17 (Colon Tumor Tissue vs. Colon Metastasis) | 6 | 0 | 6.09 | |
| | | 15, 17 (Normal Colon Tissue vs. Colon Metastasis) | 20 | 0 | 21.47 | |
| 1806 | 728273 | 16, 17 (Colon Tumor Tissue vs. Colon Metastasis) | 7 | 0 | 7.11 | |
| | | 15, 16 (Normal Colon vs. Colon Tumor Tissue) | 0 | 7 | | 6.62 |
| 1807 | 185579 | 03, 04 (Breast, High Met vs. Breast, Non-Met) | 0 | 8 | | 8.2 |
| 1808 | 724473 | 15, 16 (Normal Colon vs. Colon Tumor Tissue) | 0 | 6 | | 5.68 |
| | | 16, 17 (Colon Tumor Tissue vs. Colon Metastasis) | 6 | 0 | 6.09 | |
| | | 21, 22 (Normal Prostate vs. Prostate Cancer) | 5 | 16 | | 3.25 |
| 1809 | 559674 | 15, 17 (Normal Colon Tissue vs. Colon Metastasis) | 0 | 7 | | 6.52 |
| 1810 | 456026 | 15, 16 (Normal Colon vs. Colon Tumor Tissue) | 24 | 4 | 6.34 | |
| | | 15, 17 (Normal Colon Tissue vs. Colon Metastasis) | 24 | 8 | 3.22 | |
| 1811 | 549320 | 15, 17 (Normal Colon Tissue vs. Colon Metastasis) | 0 | 7 | | 6.52 |
| 1812 | 447338 | 15, 17 (Normal Colon Tissue vs. Colon Metastasis) | 7 | 0 | 7.51 | |
| 1813 | 560700 | 16, 17 (Colon Tumor Tissue vs. Colon Metastasis) | 0 | 6 | | 5.91 |
| 1814 | 3070 | 16, 17 (Colon Tumor Tissue vs. Colon Metastasis) | 0 | 6 | | 5.91 |
| 1815 | 3070 | 16, 17 (Colon Tumor Tissue vs. Colon Metastasis) | 0 | 6 | | 5.91 |
| 1816 | 380477 | 15, 17 (Normal Colon Tissue vs. Colon Metastasis) | 7 | 0 | 7.51 | |
| 1817 | 735040 | 15, 16 (Normal Colon vs. Colon Tumor Tissue) | 0 | 6 | | 5.68 |
| | | 16, 17 (Colon Tumor Tissue vs. Colon Metastasis) | 6 | 0 | 6.09 | |
| 1818 | 378525 | 16, 17 (Colon Tumor Tissue vs. Colon Metastasis) | 9 | 1 | 9.14 | |
| 1819 | 284586 | 15, 17 (Normal Colon Tissue vs. Colon Metastasis) | 6 | 0 | 6.44 | |
| 1820 | 640276 | 16, 17 (Colon Tumor Tissue vs. Colon Metastasis) | 8 | 0 | 8.12 | |
| 1821 | 3344 | 01, 02 (Colon, High Met vs. Colon, Low Met) | 7 | 17 | | 2.63 |
| 1822 | 555830 | 15, 16 (Normal Colon vs. Colon Tumor Tissue) | 16 | 2 | 8.46 | |
| | | 15, 17 (Normal Colon Tissue vs. Colon Metastasis) | 16 | 2 | 8.59 | |
| 1823 | 726307 | l5, 16 (Normal Colon vs. Colon Tumor Tissue) | 0 | 6 | | 5.68 |
| | | 16, 17 (Colon Tumor Tissue vs. Colon Metastasis) | 6 | 0 | 6.09 | |
| 1824 | 416 | 15, 16 (Normal Colon vs. Colon Tumor Tissue) | 8 | 23 | | 2.72 |
| | | 21, 22 (Normal Prostate vs. Prostate Cancer) | 11 | 31 | | 2.87 |
| | | 15, 17 (Normal Colon Tissue vs. Colon Metastasis) | 8 | 22 | | 2.56 |
| 1825 | 2543 | 01, 02 (Colon, High Met vs. Colon, Low Met) | 23 | 7 | 3.03 | |
| 1826 | 639352 | 15, 17 (Normal Colon Tissue vs. Colon Metastasis) | 7 | 0 | 7.51 | |
| | | 15, 16 (Normal Colon vs. Colon Tumor Tissue) | 7 | 0 | 7.4 | |
| 1827 | 453592 | 15, 16 (Normal Colon vs. Colon Tumor Tissue) | 19 | 6 | 3.35 | |
| 1828 | 450633 | 15, 16 (Normal Colon vs. Colon Tumor Tissue) | 34 | 13 | 2.76 | |
| | | 15, 17 (Normal Colon Tissue vs. Colon Metastasis) | 34 | 7 | 5.21 | |
| 1829 | 448383 | 15, 17 (Normal Colon Tissue vs. Colon Metastasis) | 13 | 1 | 13.95 | |
| 1830 | 648719 | 15, 17 (Normal Colon Tissue vs. Colon Metastasis) | 9 | 0 | 9.66 | |
| | | 15, 16 (Normal Colon vs. Colon Tumor Tissue) | 9 | 1 | 9.51 | |
| 1831 | 730655 | 16, 17 (Colon Tumor Tissue vs. Colon Metastasis) | 6 | 0 | 6.09 | |
| | | 15, 16 (Normal Colon vs. Colon Tumor Tissue) | 0 | 6 | | 5.68 |
| 1832 | 141185 | 15, 16 (Normal Colon vs. Colon Tumor Tissue) | 8 | 0 | 8.46 | |
| | | 15, 17 (Normal Colon Tissue vs. Colon Metastasis) | 8 | 0 | 8.59 | |
| 1833 | 640498 | 16, 17 (Colon Tumor Tissue vs. Colon Metastasis) | 6 | 0 | 6.09 | |
| 1834 | 9029 | 01, 02 (Colon, High Met vs. Colon, Low Met) | 7 | 0 | 6.46 | |
| 1835 | 559674 | 15, 17 (Normal Colon Tissue vs. Colon Metastasis) | 0 | 7 | | 6.52 |
| 1836 | 555734 | 15, 17 (Normal Colon Tissue vs. Colon Metastasis) | 0 | 10 | | 9.32 |
| | | 16, 17 (Colon Tumor Tissue vs. Colon Metastasis) | 0 | 10 | | 9.85 |
| 1837 | 1943 | 03, 04 (Breast, High Met vs. Breast, Non-Met) | 16 | 4 | 3.9 | |
| | | 01, 02 (Colon, High Met vs. Colon, Low Met) | 9 | 29 | | 3.49 |
| | | 15, 16 (Normal Colon vs. Colon Tumor Tissue) | 6 | 19 | | 3 |
| 1838 | 648320 | 15, 17 (Normal Colon Tissue vs. Colon Metastasis) | 6 | 0 | 6.44 | |
| | | 15, 16 (Normal Colon vs. Colon Tumor Tissue) | 6 | 0 | 6.34 | |
| 1839 | 558098 | 15, 16 (Normal Colon vs. Colon Tumor Tissue) | 6 | 0 | 6.34 | |
| 1840 | 468672 | 16, 17 (Colon Tumor Tissue vs. Colon Metastasis) | 0 | 8 | | 7.88 |
| | | 15, 16 (Normal Colon vs. Colon Tumor Tissue) | 6 | 0 | 6.34 | |
| 1841 | 456596 | 16, 17 (Colon Tumor Tissue vs. Colon Metastasis) | 1 | 12 | | 11.82 |
| | | 15, 17 (Normal Colon Tissue vs. Colon Metastasis) | 2 | 12 | | 5.59 |
| 1842 | 649722 | 16, 17 (Colon Tumor Tissue vs. Colon Metastasis) | 6 | 0 | 6.09 | |
| | | 15, 17 (Normal Colon Tissue vs. Colon Metastasis) | 8 | 0 | 8.59 | |
| 1843 | 550708 | 16, 17 (Colon Tumor Tissue vs. Colon Metastasis) | 1 | 8 | | 7.88 |
| 1844 | 643931 | 15, 17 (Normal Colon Tissue vs. Colon Metastasis) | 7 | 0 | 7.51 | |
| 1845 | 726927 | 16, 17 (Colon Tumor Tissue vs. Colon Metastasis) | 11 | 0 | 11.17 | |
| | | 15, 16 (Normal Colon vs. Colon Tumor Tissue) | 0 | 11 | | 10.41 |
| 1846 | 459012 | 15, 17 (Normal Colon Tissue vs. Colon Metastasis) | 6 | 0 | 6.44 | |
| | | 15, 16 (Normal Colon vs. Colon Tumor Tissue) | 6 | 0 | 6.34 | |
| 1847 | 397773 | 15, 17 (Normal Colon Tissue vs. Colon Metastasis) | 12 | 0 | 12.88 | |
| | | 16, 17 (Colon Tumor Tissue vs. Colon Metastasis) | 9 | 0 | 9.14 | |
| 1848 | 450004 | 15, 16 (Normal Colon vs. Colon Tumor Tissue) | 0 | 13 | | 12.3 |
| | | 16, 17 (Colon Tumor Tissue vs. Colon Metastasis) | 13 | 2 | 6.6 | |
| 1849 | 649732 | 16, 17 (Colon Tumor Tissue vs. Colon Metastasis) | 7 | 0 | 7.11 | |
| 1850 | 553955 | 16, 17 (Colon Tumor Tissue vs. Colon Metastasis) | 0 | 6 | | 5.91 |
| 1851 | 646309 | 16, 17 (Colon Tumor Tissue vs. Colon Metastasis) | 6 | 0 | 6.09 | |
| 1852 | 402727 | 15, 17 (Normal Colon Tissue vs. Colon Metastasis) | 5 | 17 | | 3.17 |
| 1853 | 468736 | 16, 17 (Colon Tumor Tissue vs. Colon Metastasis) | 0 | 6 | | 5.91 |
| 1854 | 650422 | 15, 16 (Normal Colon vs. Colon Tumor Tissue) | 18 | 6 | 3.17 | |
| | | 16, 17 (Colon Tumor Tissue vs. Colon Metastasis) | 6 | 0 | 6.09 | |
| | | 15, 17 (Normal Colon Tissue vs. Colon Metastasis) | 18 | 0 | 19.32 | |
| 1855 | 730533 | 16, 17 (Colon Tumor Tissue vs. Colon Metastasis) | 7 | 0 | 7.11 | |
| | | 15, 16 (Normal Colon vs. Colon Tumor Tissue) | 0 | 7 | | 6.62 |
| 1856 | 726307 | 16, 17 (Colon Tumor Tissue vs. Colon Metastasis) | 6 | 0 | 6.09 | |
| | | 15, 16 (Normal Colon vs. Colon Tumor Tissue) | 0 | 6 | | 5.68 |
| 1857 | 450311 | 15, 16 (Normal Colon vs. Colon Tumor Tissue) | 8 | 1 | 8.46 | |
| 1858 | 450940 | 15, 17 (Normal Colon Tissue vs. Colon Metastasis) | 1 | 9 | | 8.38 |
| | | 16, 17 (Colon Tumor Tissue vs. Colon Metastasis) | 0 | 9 | | 8.86 |
| 1859 | 726786 | 15, 16 (Normal Colon vs. Colon Tumor Tissue) | 0 | 8 | | 7.57 |
| | | 16, 17 (Colon Tumor Tissue vs. Colon Metastasis) | 8 | 0 | 8.12 | |
| 1860 | 7634 | 03, 04 (Breast, High Met vs. Breast, Non-Met) | 6 | 0 | 5.85 | |
| 1861 | 230995 | 15, 16 (Normal Colon vs. Colon Tumor Tissue) | 0 | 7 | | 6.62 |
| 1862 | 374770 | 15, 17 (Normal Colon Tissue vs. Colon Metastasis) | 8 | 0 | 8.59 | |
| | | l5, 16 (Normal Colon vs. Colon Tumor Tissue) | 8 | 0 | 8.46 | |
| 1863 | 9275 | 03, 04 (Breast, High Met vs. Breast, Non-Met) | 0 | 6 | | 6.15 |
| 1864 | 553860 | 15, 17 (Normal Colon Tissue vs. Colon Metastasis) | 0 | 9 | | 8.38 |
| 1865 | 452010 | 16, 17 (Colon Tumor Tissue vs. Colon Metastasis) | 13 | 3 | 4.4 | |
| | | 15, 16 (Normal Colon vs. Colon Tumor Tissue) | 3 | 13 | | 4.1 |
| 1866 | 649560 | 16, 17 (Colon Tumor Tissue vs. Colon Metastasis) | 7 | 0 | 7.11 | |
| 1867 | 452704 | 15, 16 (Normal Colon vs. Colon Tumor Tissue) | 10 | 1 | 10.57 | |
| 1868 | 447594 | 18, 19 (Normal Colon Tissue vs. Colon Tumor) | 11 | 2 | 6.29 | |
| | | 15, 17 (Normal Colon Tissue vs. Colon Metastasis) | 6 | 20 | | 3.11 |
| 1869 | 555444 | 16, 17 (Colon Tumor Tissue vs. Colon Metastasis) | 22 | 4 | 5.59 | |
| | | 15, 16 (Normal Colon vs. Colon Tumor Tissue) | 2 | 22 | | 10.41 |
| 1870 | 736556 | 16, 17 (Colon Tumor Tissue vs. Colon Metastasis) | 8 | 0 | 8.12 | |
| | | 15, 16 (Normal Colon vs. Colon Tumor Tissue) | 0 | 8 | | 7.57 |
| 1871 | 5289 | 03, 04 (Breast, High Met vs. Breast, Non-Met) | 19 | 2 | 9.27 | |
| 1872 | 732121 | 15, 16 (Normal Colon vs. Colon Tumor Tissue) | 0 | 7 | | 6.62 |
| | | 16, 17 (Colon Tumor Tissue vs. Colon Metastasis) | 7 | 0 | 7.11 | |
| 1873 | 452567 | 16, 17 (Colon Tumor Tissue vs. Colon Metastasis) | 3 | 14 | | 4.6 |
| | | 15, 16 (Normal Colon vs. Colon Tumor Tissue) | 21 | 3 | 7.4 | |
| 1874 | 551634 | 16, 17 (Colon Tumor Tissue vs. Colon Metastasis) | 0 | 6 | | 5.91 |
| 1875 | 644099 | 15, 17 (Normal Colon Tissue vs. Colon Metastasis) | 6 | 0 | 6.44 | |
| 1876 | 726788 | 16, 17 (Colon Tumor Tissue vs. Colon Metastasis) | 6 | 0 | 6.09 | |
| | | 15, 16 (Normal Colon vs. Colon Tumor Tissue) | 0 | 6 | | 5.68 |
| 1877 | 638802 | 15, 17 (Normal Colon Tissue vs. Colon Metastasis) | 6 | 0 | 6.44 | |
| 1878 | 646283 | 15, 17 (Normal Colon Tissue vs. Colon Metastasis) | 9 | 0 | 9.66 | |
| | | 15, 16 (Normal Colon vs. Colon Tumor Tissue) | 9 | 0 | 9.51 | |
| 1879 | 8403 | 03, 04 (Breast, High Met vs. Breast, Non-Met) | 6 | 0 | 5.85 | |
| 1880 | 2224 | 03, 04 (Breast, High Met vs. Breast, Non-Met) | 44 | 8 | 5.37 | |
| 1881 | 650053 | 15, 17 (Normal Colon Tissue vs. Colon Metastasis) | 10 | 0 | 10.73 | |
| | | 15, 16 (Normal Colon vs. Colon Tumor Tissue) | 10 | 1 | 10.57 | |
| 1882 | 380477 | 15, 17 (Normal Colon Tissue vs. Colon Metastasis) | 7 | 0 | 7.51 | |
| 1883 | 450867 | 15, 16 (Normal Colon vs. Colon Tumor Tissue) | 7 | 0 | 7.4 | |
| 1884 | 456764 | 16, 17 (Colon Tumor Tissue vs. Colon Metastasis) | 10 | 1 | 10.16 | |
| | | 15, 17 (Normal Colon Tissue vs. Colon Metastasis) | 14 | 1 | 15.03 | |
| 1885 | 641373 | 15, 16 (Normal Colon vs. Colon Tumor Tissue) | 15 | 3 | 5.28 | |
| | | 15, 17 (Normal Colon Tissue vs. Colon Metastasis) | 15 | 0 | 16.1 | |
| 1886 | 555882 | 16, 17 (Colon Tumor Tissue vs. Colon Metastasis) | 0 | 9 | | 8.86 |
| 1887 | 644046 | 15, 17 (Normal Colon Tissue vs. Colon Metastasis) | 9 | 0 | 9.66 | |
| 1888 | 447250 | 16, 17 (Colon Tumor Tissue vs. Colon Metastasis) | 6 | 0 | 6.09 | |
| 1889 | 456596 | 15, 17 (Normal Colon Tissue vs. Colon Metastasis) | 2 | 12 | | 5.59 |
| | | 16, 17 (Colon Tumor Tissue vs. Colon Metastasis) | 1 | 12 | | 11.82 |
| 1890 | 2218 | 01, 02 (Colon, High Met vs. Colon, Low Met) | 2 | 21 | | 11.38 |
| | | 03, 04 (Breast, High Met vs. Breast, Non-Met) | 27 | 8 | 3.29 | |
| | | 08, 09 (Lung, High Met vs. Lung, Low Met) | 5 | 0 | 6.99 | |
| 1891 | 446450 | 15, 16 (Normal Colon vs. Colon Tumor Tissue) | 11 | 3 | 3.88 | |
| 1892 | 640889 | 15, 17 (Normal Colon Tissue vs. Colon Metastasis) | 6 | 0 | 6.44 | |
| 1893 | 530774 | 15, 17 (Normal Colon Tissue vs. Colon Metastasis) | 5 | 16 | | 2.98 |
| 1894 | 649062 | 15, 17 (Normal Colon Tissue vs. Colon Metastasis) | 6 | 0 | 6.44 | |
| | | 15, 16 (Normal Colon vs. Colon Tumor Tissue) | 6 | 0 | 6.34 | |
| 1895 | 12808 | 03, 04 (Breast, High Met vs. Breast, Non-Met) | 6 | 0 | 5.85 | |
| 1896 | 468672 | 15, 16 (Normal Colon vs. Colon Tumor Tissue) | 6 | 0 | 6.34 | |
| | | 16, 17 (Colon Tumor Tissue vs. Colon Metastasis) | 0 | 8 | | 7.88 |
| 1897 | 650773 | 15, 17 (Normal Colon Tissue vs. Colon Metastasis) | 6 | 0 | 6.44 | |
| 1898 | 732237 | 16, 17 (Colon Tumor Tissue vs. Colon Metastasis) | 6 | 0 | 6.09 | |
| | | 15, 16 (Normal Colon vs. Colon Tumor Tissue) | 0 | 6 | | 5.68 |
| 1899 | 650773 | 15, 17 (Normal Colon Tissue vs. Colon Metastasis) | 6 | 0 | 6.44 | |
| 1900 | 550216 | 15, 17 (Normal Colon Tissue vs. Colon Metastasis) | 0 | 7 | | 6.52 |
| 1901 | 639189 | 15, 17 (Normal Colon Tissue vs. Colon Metastasis) | 7 | 0 | 7.51 | |
| 1902 | 3447 | 01, 02 (Colon, High Met vs. Colon, Low Met) | 2 | 16 | | 8.67 |
| | | 08, 09 (Lung, High Met vs. Lung, Low Met) | 0 | 13 | | 9.3 |
| 1903 | 2012 | 03, 04 (Breast, High Met vs. Breast, Non-Met) | 20 | 58 | | 2.97 |
| | | 01, 02 (Colon, High Met vs. Colon, Low Met) | 13 | 29 | | 2.42 |
| 1904 | 642876 | 15, 17 (Normal Colon Tissue vs. Colon Metastasis) | 10 | 0 | 10.73 | |
| | | 15, 16 (Normal Colon vs. Colon Tumor Tissue) | 10 | 2 | 5.28 | |
| 1905 | 449690 | 16, 17 (Colon Tumor Tissue vs. Colon Metastasis) | 3 | 17 | | 5.58 |
| 1906 | 451208 | 15, 17 (Normal Colon Tissue vs. Colon Metastasis) | 14 | 3 | 5.01 | |
| 1907 | 725811 | 16, 17 (Colon Tumor Tissue vs. Colon Metastasis) | 6 | 0 | 6.09 | |
| | | 15, 16 (Normal Colon vs. Colon Tumor Tissue) | 0 | 6 | | 5.68 |
| 1908 | 1256 | 08, 09 (Lung, High Met vs. Lung, Low Met) | 35 | 110 | | 2.25 |
| | | 03, 04 (Breast, High Met vs. Breast, Non-Met) | 14 | 31 | | 2.27 |
| 1909 | 446599 | 15, 16 (Normal Colon vs. Colon Tumor Tissue) | 13 | 2 | 6.87 | |
| 1910 | 446537 | 15, 16 (Normal Colon vs. Colon Tumor Tissue) | 9 | 1 | 9.51 | |
| 1911 | 726281 | 15, 16 (Normal Colon vs. Colon Tumor Tissue) | 0 | 7 | | 6.62 |
| | | 16, 17 (Colon Tumor Tissue vs. Colon Metastasis) | 7 | 0 | 7.11 | |
| 1912 | 11286 | 01, 02 (Colon, High Met vs. Colon, Low Met) | 0 | 6 | | 6.5 |
| 1913 | 556082 | 16, 17 (Colon Tumor Tissue vs. Colon Metastasis) | 0 | 10 | | 9.85 |
| 1914 | 97507 | 15, 16 (Normal Colon vs. Colon Tumor Tissue) | 1 | 9 | | 8.51 |
| 1915 | 535955 | 16, 17 (Colon Tumor Tissue vs. Colon Metastasis) | 0 | 10 | | 9.85 |
| | | 15, 17 (Normal Colon Tissue vs. Colon Metastasis) | 1 | 10 | | 9.32 |
| 1916 | 728251 | 16, 17 (Colon Tumor Tissue vs. Colon Metastasis) | 6 | 0 | 6.09 | |
| | | 15, 16 (Normal Colon vs. Colon Tumor Tissue) | 0 | 6 | | 5.68 |
| 1917 | 733849 | 16, 17 (Colon Tumor Tissue vs. Colon Metastasis) | 7 | 0 | 7.11 | |
| | | 15, 16 (Normal Colon vs. Colon Tumor Tissue) | 0 | 7 | | 6.62 |
| 1918 | 447574 | 15, 17 (Normal Colon Tissue vs. Colon Metastasis) | 7 | 0 | 7.51 | |
| 1919 | 7607 | 15, 17 (Normal Colon Tissue vs. Colon Metastasis) | 13 | 3 | 4.65 | |
| | | 15, 16 (Normal Colon vs. Colon Tumor Tissue) | 13 | 4 | 3.44 | |
| | | 01, 02 (Colon, High Met vs. Colon, Low Met) | 0 | 7 | | 7.59 |
| 1920 | 644032 | 15, 16 (Normal Colon vs. Colon Tumor Tissue) | 7 | 124 | | 16.76 |
| | | 16, 17 (Colon Tumor Tissue vs. Colon Metastasis) | 124 | 0 | 125.92 | |
| | | 15, 17 (Normal Colon Tissue vs. Colon Metastasis) | 7 | 0 | 7.51 | |
| 1921 | 454087 | 15, 16 (Normal Colon vs. Colon Tumor Tissue) | 14 | 3 | 4.93 | |
| | | 15, 17 (Normal Colon Tissue vs. Colon Metastasis) | 14 | 1 | 15.03 | |
| 1922 | 412364 | 15, 16 (Normal Colon vs. Colon Tumor Tissue) | 6 | 0 | 6.34 | |
| | | 15, 17 (Normal Colon Tissue vs. Colon Metastasis) | 6 | 0 | 6.44 | |
| 1923 | 535208 | 15, 16 (Normal Colon vs. Colon Tumor Tissue) | 6 | 0 | 6.34 | |
| | | 15, 17 (Normal Colon Tissue vs. Colon Metastasis) | 6 | 0 | 6.44 | |
| 1924 | 644609 | 15, 17 (Normal Colon Tissue vs. Colon Metastasis) | 7 | 0 | 7.51 | |
| 1925 | 645073 | 15, 16 (Normal Colon vs. Colon Tumor Tissue) | 6 | 0 | 6.34 | |
| | | 15, 17 (Normal Colon Tissue vs. Colon Metastasis) | 6 | 0 | 6.44 | |
| 1926 | 417467 | 15, 17 (Normal Colon Tissue vs. Colon Metastasis) | 0 | 7 | | 6.52 |
| 1927 | 554188 | 15, 16 (Normal Colon vs. Colon Tumor Tissue) | 6 | 0 | 6.34 | |
| 1928 | 647185 | 15, 17 (Normal Colon Tissue vs. Colon Metastasis) | 6 | 0 | 6.44 | |
| 1929 | 736679 | 15, 16 (Normal Colon vs. Colon Tumor Tissue) | 0 | 6 | | 5.68 |
| | | 16, 17 (Colon Tumor Tissue vs. Colon Metastasis) | 6 | 0 | 6.09 | |
| 1930 | 553547 | 16, 17 (Colon Tumor Tissue vs. Colon Metastasis) | 0 | 6 | | 5.91 |
| 1931 | 641524 | 16, 17 (Colon Tumor Tissue vs. Colon Metastasis) | 6 | 0 | 6.09 | |
| 1932 | 649717 | 16, 17 (Colon Tumor Tissue vs. Colon Metastasis) | 6 | 0 | 6.09 | |
| 1933 | 451041 | 16, 17 (Colon Tumor Tissue vs. Colon Metastasis) | 0 | 6 | | 5.91 |
| 1934 | 3483 | 01, 02 (Colon, High Met vs. Colon, Low Met) | 3 | 20 | | 7.23 |
| 1935 | 500959 | 15, 16 (Normal Colon vs. Colon Tumor Tissue) | 8 | 0 | 8.46 | |
| | | 15, 17 (Normal Colon Tissue vs. Colon Metastasis) | 8 | 0 | 8.59 | |
| 1936 | 500959 | 15, 16 (Normal Colon vs. Colon Tumor Tissue) | 8 | 0 | 8.46 | |
| | | 15, 17 (Normal Colon Tissue vs. Colon Metastasis) | 8 | 0 | 8.59 | |
| 1937 | 697 | 03, 04 (Breast, High Met vs. Breast, Non-Met) | 30 | 72 | | 2.46 |
| | | 21, 22 (Normal Prostate vs. Prostate Cancer) | 10 | 2 | 4.92 | |
| 1938 | 736955 | 16, 17 (Colon Tumor Tissue vs. Colon Metastasis) | 13 | 0 | 13.2 | |
| | | 15, 16 (Normal Colon vs. Colon Tumor Tissue) | 0 | 13 | | 12.3 |
| 1939 | 554742 | 16, 17 (Colon Tumor Tissue vs. Colon Metastasis) | 0 | 6 | | 5.91 |
| 1940 | 642973 | 16, 17 (Colon Tumor Tissue vs. Colon Metastasis) | 7 | 0 | 7.11 | |
| 1941 | 449437 | 15, 16 (Normal Colon vs. Colon Tumor Tissue) | 14 | 3 | 4.93 | |
| | | 16, 17 (Colon Tumor Tissue vs. Colon Metastasis) | 3 | 12 | | 3.94 |
| 1942 | 467991 | 15, 16 (Normal Colon vs. Colon Tumor Tissue) | 7 | 0 | 7.4 | |
| 1943 | 650204 | 15, 17 (Normal Colon Tissue vs. Colon Metastasis) | 11 | 0 | 11.81 | |
| 1944 | 640618 | 15, 17 (Normal Colon Tissue vs. Colon Metastasis) | 6 | 0 | 6.44 | |
| 1945 | 452366 | 15, 17 (Normal Colon Tissue vs. Colon Metastasis) | 6 | 0 | 6.44 | |
| | | 15, 16 (Normal Colon vs. Colon Tumor Tissue) | 6 | 0 | 6.34 | |
| 1946 | 640276 | 16, 17 (Colon Tumor Tissue vs. Colon Metastasis) | 8 | 0 | 8.12 | |
| 1947 | 554101 | 15, 16 (Normal Colon vs. Colon Tumor Tissue) | 0 | 6 | | 5.68 |
| 1948 | 185432 | 03, 04 (Breast, High Met vs. Breast, Non-Met) | 0 | 26 | | 26.65 |
| 1949 | 455598 | 16, 17 (Colon Tumor Tissue vs. Colon Metastasis) | 0 | 6 | | 5.91 |
| 1950 | 649354 | 15, 16 (Normal Colon vs. Colon Tumor Tissue) | 6 | 0 | 6.34 | |
| | | 15, 17 (Normal Colon Tissue vs. Colon Metastasis) | 6 | 0 | 6.44 | |
| 1951 | 4408 | 03, 04 (Breast, High Met vs. Breast, Non-Met) | 4 | 17 | | 4.36 |
| | | 08, 09 (Lung, High Met vs. Lung, Low Met) | 21 | 3 | 9.78 | |
| 1952 | 452366 | 15, 17 (Normal Colon Tissue vs. Colon Metastasis) | 6 | 0 | 6.44 | |
| | | 15, 16 (Normal Colon vs. Colon Tumor Tissue) | 6 | 0 | 6.34 | |
| 1953 | 452366 | 15, 17 (Normal Colon Tissue vs. Colon Metastasis) | 6 | 0 | 6.44 | |
| | | 15, 16 (Normal Colon vs. Colon Tumor Tissue) | 6 | 0 | 6.34 | |
| 1954 | 727331 | 15, 16 (Normal Colon vs. Colon Tumor Tissue) | 0 | 6 | | 5.68 |
| | | 16, 17 (Colon Tumor Tissue vs. Colon Metastasis) | 6 | 0 | 6.09 | |
| 1955 | 644853 | 15, 16 (Normal Colon vs. Colon Tumor Tissue) | 6 | 0 | 6.34 | |
| | | 15, 17 (Normal Colon Tissue vs. Colon Metastasis) | 6 | 0 | 6.44 | |
| 1956 | 554079 | 16, 17 (Colon Tumor Tissue vs. Colon Metastasis) | 2 | 10 | | 4.92 |
| 1957 | 556245 | 15, 16 (Normal Colon vs. Colon Tumor Tissue) | 0 | 6 | | 5.68 |
| 1958 | 557388 | 16, 17 (Colon Tumor Tissue vs. Colon Metastasis) | 13 | 2 | 6.6 | |
| | | 15, 16 (Normal Colon vs. Colon Tumor Tissue) | 0 | 13 | | 12.3 |
| 1959 | 449468 | 15, 17 (Normal Colon Tissue vs. Colon Metastasis) | 2 | 11 | | 5.12 |
| 1960 | 556245 | 15, 16 (Normal Colon vs. Colon Tumor Tissue) | 0 | 6 | | 5.68 |
| 1961 | 455327 | 15, 17 (Normal Colon Tissue vs. Colon Metastasis) | 1 | 12 | | 11.18 |
| | | 15, 16 (Normal Colon vs. Colon Tumor Tissue) | 1 | 10 | | 9.46 |
| 1962 | 546632 | 23, 24 (Normal Lung Tissue vs. Lung Tumor Tissue) | 3 | 34 | | 11.22 |
| | | 16, 17 (Colon Tumor Tissue vs. Colon Metastasis) | 15 | 0 | 15.23 | |
| 1963 | 558762 | 16, 17 (Colon Tumor Tissue vs. Colon Metastasis) | 0 | 7 | | 6.89 |
| 1964 | 550818 | 16, 17 (Colon Tumor Tissue vs. Colon Metastasis) | 1 | 8 | | 7.88 |
| 1965 | 554079 | 16, 17 (Colon Tumor Tissue vs. Colon Metastasis) | 2 | 10 | | 4.92 |
| 1966 | 452430 | 15, 17 (Normal Colon Tissue vs. Colon Metastasis) | 6 | 0 | 6.44 | |
| 1967 | 452430 | 15, 17 (Normal Colon Tissue vs. Colon Metastasis) | 6 | 0 | 6.44 | |
| 1968 | 556082 | 16, 17 (Colon Tumor Tissue vs. Colon Metastasis) | 0 | 10 | | 9.85 |
| 1969 | 514418 | 16, 17 (Colon Tumor Tissue vs. Colon Metastasis) | 0 | 9 | | 8.86 |
| | | 15, 17 (Normal Colon Tissue vs. Colon Metastasis) | 1 | 9 | | 8.38 |
| 1970 | 426895 | 15, 17 (Normal Colon Tissue vs. Colon Metastasis) | 2 | 18 | | 8.38 |
| 1971 | 560803 | 16, 17 (Colon Tumor Tissue vs. Colon Metastasis) | 0 | 7 | | 6.89 |
| | | 15, 17 (Normal Colon Tissue vs. Colon Metastasis) | 0 | 7 | | 6.52 |
| 1972 | 447737 | 15, 16 (Normal Colon vs. Colon Tumor Tissue) | 19 | 6 | 3.35 | |
| 1973 | 373432 | 15, 17 (Normal Colon Tissue vs. Colon Metastasis) | 23 | 78 | | 3.16 |
| | | 15, 16 (Normal Colon vs. Colon Tumor Tissue) | 23 | 53 | | 2.18 |
| | | 08, 09 (Lung, High Met vs. Lung, Low Met) | 3 | 49 | | 11.69 |
| 1974 | 779 | 03, 04 (Breast, High Met vs. Breast, Non-Met) | 60 | 22 | 2.66 | |
| | | 01, 02 (Colon, High Met vs. Colon, Low Met) | 27 | 54 | | 2.17 |
| 1975 | 455327 | 15, 16 (Normal Colon vs. Colon Tumor Tissue) | 1 | 10 | | 9.46 |
| | | 15, 17 (Normal Colon Tissue vs. Colon Metastasis) | 1 | 12 | | 11.18 |
| 1976 | 554742 | 16, 17 (Colon Tumor Tissue vs. Colon Metastasis) | 0 | 6 | | 5.91 |
| 1977 | 455327 | 15, 16 (Normal Colon vs. Colon Tumor Tissue) | 1 | 10 | | 9.46 |
| | | 15, 17 (Normal Colon Tissue vs. Colon Metastasis) | 1 | 12 | | 11.18 |
| 1978 | 11043 | 01, 02 (Colon, High Met vs. Colon, Low Met) | 0 | 6 | | 6.5 |
| 1979 | 727447 | 15, 16 (Normal Colon vs. Colon Tumor Tissue) | 0 | 6 | | 5.68 |
| | | 16, 17 (Colon Tumor Tissue vs. Colon Metastasis) | 6 | 0 | 6.09 | |
| 1980 | 552905 | 15, 17 (Normal Colon Tissue vs. Colon Metastasis) | 0 | 7 | | 6.52 |
| 1981 | 446900 | 16, 17 (Colon Tumor Tissue vs. Colon Metastasis) | 2 | 11 | | 5.42 |
| | | 15, 17 (Normal Colon Tissue vs. Colon Metastasis) | 1 | 11 | | 10.25 |
| 1982 | 644190 | 16, 17 (Colon Tumor Tissue vs. Colon Metastasis) | 6 | 0 | 6.09 | |
| 1983 | 455327 | 15, 16 (Normal Colon vs. Colon Tumor Tissue) | 1 | 10 | | 9.46 |
| | | 15, 17 (Normal Colon Tissue vs. Colon Metastasis) | 1 | 12 | | 11.18 |
| 1984 | 422375 | 15, 17 (Normal Colon Tissue vs. Colon Metastasis) | 2 | 11 | | 5.12 |
| 1985 | 422375 | 15, 17 (Normal Colon Tissue vs. Colon Metastasis) | 2 | 11 | | 5.12 |
| 1986 | 530774 | 15, 17 (Normal Colon Tissue vs. Colon Metastasis) | 5 | 16 | | 2.98 |
| 1987 | 554101 | 15, 16 (Normal Colon vs. Colon Tumor Tissue) | 0 | 6 | | 5.68 |
| 1988 | 5268 | 01, 02 (Colon, High Met vs. Colon, Low Met) | 0 | 15 | | 16.26 |
| 1989 | 642461 | 15, 17 (Normal Colon Tissue vs. Colon Metastasis) | 14 | 0 | 15.03 | |
| | | 16, 17 (Colon Tumor Tissue vs. Colon Metastasis) | 10 | 0 | 10.16 | |
| 1990 | 770 | 03, 04 (Breast, High Met vs. Breast, Non-Met) | 47 | 9 | 5.1 | |
| | | 15, 17 (Normal Colon Tissue vs. Colon Metastasis) | 11 | 1 | 11.81 | |
| 1991 | 3837 | 03, 04 (Breast, High Met vs. Breast, Non-Met) | 9 | 1 | 8.78 | |
| 1992 | 561382 | 15, 16 (Normal Colon vs. Colon Tumor Tissue) | 12 | 2 | 6.34 | |
| 1993 | 4408 | 08, 09 (Lung, High Met vs. Lung, Low Met) | 21 | 3 | 9.78 | |
| | | 03, 04 (Breast, High Met vs. Breast, Non-Met) | 4 | 17 | | 4.36 |
| 1994 | 5686 | 03, 04 (Breast, High Met vs. Breast, Non-Met) | 16 | 3 | 5.2 | |
| 1995 | 374609 | 21, 22 (Normal Prostate vs. Prostate Cancer) | 1 | 9 | | 9.15 |
| | | 15, 16 (Normal Colon vs. Colon Tumor Tissue) | 0 | 7 | | 6.62 |
| 1996 | 734793 | 16, 17 (Colon Tumor Tissue vs. Colon Metastasis) | 9 | 0 | 9.14 | |
| | | 15, 16 (Normal Colon vs. Colon Tumor Tissue) | 0 | 9 | | 8.51 |
| 1997 | 452430 | 15, 17 (Normal Colon Tissue vs. Colon Metastasis) | 6 | 0 | 6.44 | |
| 1998 | 450940 | 16, 17 (Colon Tumor Tissue vs. Colon Metastasis) | 0 | 9 | | 8.86 |
| | | 15, 17 (Normal Colon Tissue vs. Colon Metastasis) | 1 | 9 | | 8.38 |
| 1999 | 460445 | 16, 17 (Colon Tumor Tissue vs. Colon Metastasis) | 0 | 6 | | 5.91 |
| 2000 | 549041 | 16, 17 (Colon Tumor Tissue vs. Colon Metastasis) | 0 | 6 | | 5.91 |
| 2001 | 555276 | 16, 17 (Colon Tumor Tissue vs. Colon Metastasis) | 0 | 6 | | 5.91 |
| 2002 | 426895 | 15, 17 (Normal Colon Tissue vs. Colon Metastasis) | 2 | 18 | | 8.38 |
| 2003 | 1833 | 01, 02 (Colon, High Met vs. Colon, Low Met) | 9 | 25 | | 3.01 |
| 2004 | 446450 | 15, 16 (Normal Colon vs. Colon Tumor Tissue) | 11 | 3 | 3.88 | |
| 2005 | 650517 | 15, 17 (Normal Colon Tissue vs. Colon Metastasis) | 6 | 0 | 6.44 | |
| | | 15, 16 (Normal Colon vs. Colon Tumor Tissue) | 6 | 0 | 6.34 | |
| 2006 | 554785 | 16, 17 (Colon Tumor Tissue vs. Colon Metastasis) | 0 | 8 | | 7.88 |
| | | 15, 17 (Normal Colon Tissue vs. Colon Metastasis) | 0 | 8 | | 7.45 |
| 2007 | 607430 | 15, 16 (Normal Colon vs. Colon Tumor Tissue) | 6 | 0 | 6.34 | |
| 2008 | 446673 | 16, 17 (Colon Tumor Tissue vs. Colon Metastasis) | 8 | 1 | 8.12 | |
| 2009 | 734685 | 15, 16 (Normal Colon vs. Colon Tumor Tissue) | 0 | 6 | | 5.68 |
| | | 16, 17 (Colon Tumor Tissue vs. Colon Metastasis) | 6 | 0 | 6.09 | |
| 2010 | 11630 | 21, 22 (Normal Prostate vs. Prostate Cancer) | 1 | 12 | | 12.2 |
| | | 03, 04 (Breast, High Met vs. Breast, Non-Met) | 3 | 13 | | 4.44 |
| 2011 | 2930 | 01, 02 (Colon, High Met vs. Colon, Low Met) | 3 | 14 | | 5.06 |
| 2012 | 44424 | 16, 17 (Colon Tumor Tissue vs. Colon Metastasis) | 41 | 90 | | 2.16 |
| | | 15, 17 (Normal Colon Tissue vs. Colon Metastasis) | 25 | 90 | | 3.35 |
| | | 08, 09 (Lung, High Met vs. Lung, Low Met) | 4 | 40 | | 7.16 |
| 2013 | 452052 | 15, 17 (Normal Colon Tissue vs. Colon Metastasis) | 8 | 1 | 8.59 | |
| 2014 | 449356 | 15, 17 (Normal Colon Tissue vs. Colon Metastasis) | 7 | 21 | | 2.79 |
| | | 16, 17 (Colon Tumor Tissue vs. Colon Metastasis) | 4 | 21 | | 5.17 |
| 2015 | 726225 | 16, 17 (Colon Tumor Tissue vs. Colon Metastasis) | 6 | 0 | 6.09 | |
| | | 15, 16 (Normal Colon vs. Colon Tumor Tissue) | 0 | 6 | | 5.68 |
| 2016 | 453708 | 16, 17 (Colon Tumor Tissue vs. Colon Metastasis) | 1 | 19 | | 18.71 |
| | | 15, 17 (Normal Colon Tissue vs. Colon Metastasis) | 1 | 19 | | 17.7 |
| 2017 | 447858 | 15, 16 (Normal Colon vs. Colon Tumor Tissue) | 12 | 3 | 4.23 | |
| 2018 | 451613 | 15, 17 (Normal Colon Tissue vs. Colon Metastasis) | 4 | 14 | | 3.26 |
| 2019 | 650337 | 15, 16 (Normal Colon vs. Colon Tumor Tissue) | 6 | 0 | 6.34 | |
| | | 15, 17 (Normal Colon Tissue vs. Colon Metastasis) | 6 | 0 | 6.44 | |
| 2020 | 62016 | 16, 17 (Colon Tumor Tissue vs. Colon Metastasis) | 0 | 6 | | 5.91 |
| 2021 | 447250 | 16, 17 (Colon Tumor Tissue vs. Colon Metastasis) | 6 | 0 | 6.09 | |
| 2022 | 3837 | 03, 04 (Breast, High Met vs. Breast, Non-Met) | 9 | 1 | 8.78 | |
| 2023 | 640614 | 16, 17 (Colon Tumor Tissue vs. Colon Metastasis) | 13 | 0 | 13.2 | |
| 2024 | 729531 | 15, 16 (Normal Colon vs. Colon Tumor Tissue) | 0 | 6 | | 5.68 |
| | | 16, 17 (Colon Tumor Tissue vs. Colon Metastasis) | 6 | 0 | 6.09 | |
| 2025 | 729531 | 15, 16 (Normal Colon vs. Colon Tumor Tissue) | 0 | 6 | | 5.68 |
| | | 16, 17 (Colon Tumor Tissue vs. Colon Metastasis) | 6 | 0 | 6.09 | |
| 2026 | 647952 | 15, 17 (Normal Colon Tissue vs. Colon Metastasis) | 6 | 0 | 6.44 | |
| | | 15, 16 (Normal Colon vs. Colon Tumor Tissue) | 6 | 0 | 6.34 | |
| 2027 | 446913 | 15, 16 (Normal Colon vs. Colon Tumor Tissue) | 63 | 1 | 66.59 | |
| | | 18, 20 (Normal Colon Tissue vs. Colon Metastasis) | 10 | 0 | 8.55 | |
| | | 18, 19 (Normal Colon Tissue vs. Colon Tumor) | 10 | 0 | 11.43 | |
| | | 15, 17 (Normal Colon Tissue vs. Colon Metastasis) | 63 | 0 | 67.62 | |
| 2028 | 2675 | 03, 04 (Breast, High Met vs. Breast, Non-Met) | 12 | 2 | 5.85 | |
| 2029 | 643481 | 15, 17 (Normal Colon Tissue vs. Colon Metastasis) | 6 | 0 | 6.44 | |
| 2030 | 1345 | 21, 22 (Normal Prostate vs. Prostate Cancer) | 18 | 6 | 2.95 | |
| | | 15, 16 (Normal Colon vs. Colon Tumor Tissue) | 0 | 6 | | 5.68 |
| | | 08, 09 (Lung, High Met vs. Lung, Low Met) | 44 | 27 | 2.28 | |
| | | 03, 04 (Breast, High Met vs. Breast, Non-Met) | 25 | 11 | 2.22 | |
| 2031 | 26 | 03, 04 (Breast, High Met vs. Breast, Non-Met) | 62 | 0 | 60.49 | |
| | | 01, 02 (Colon, High Met vs. Colon, Low Met) | 0 | 28 | | 30.36 |
| 2032 | 945 | 01, 02 (Colon, High Met vs. Colon, Low Met) | 10 | 21 | | 2.28 |
| 2033 | 449169 | 15, 16 (Normal Colon vs. Colon Tumor Tissue) | 16 | 2 | 8.46 | |
| 2034 | 394193 | 16, 17 (Colon Tumor Tissue vs. Colon Metastasis) | 0 | 6 | | 5.91 |
| 2035 | 452212 | 15, 16 (Normal Colon vs. Colon Tumor Tissue) | 6 | 0 | 6.34 | |
| 2036 | 394193 | 16, 17 (Colon Tumor Tissue vs. Colon Metastasis) | 0 | 6 | | 5.91 |
| 2037 | 1310 | 03, 04 (Breast, High Met vs. Breast, Non-Met) | 42 | 16 | 2.56 | |
| | | 21, 22 (Normal Prostate vs. Prostate Cancer) | 15 | 2 | 7.38 | |
| 2038 | 734094 | 16, 17 (Colon Tumor Tissue vs. Colon Metastasis) | 8 | 0 | 8.12 | |
| | | 23, 24 (Normal Lung Tissue vs. Lung Tumor Tissue) | 6 | 0 | 6.06 | |
| | | 15, 16 (Normal Colon vs. Colon Tumor Tissue) | 0 | 8 | | 7.57 |
| 2039 | 646579 | 15, 17 (Normal Colon Tissue vs. Colon Metastasis) | 6 | 0 | 6.44 | |
| 2040 | 4471 | 03, 04 (Breast, High Met vs. Breast, Non-Met) | 10 | 1 | 9.76 | |
| 2041 | 729173 | 16, 17 (Colon Tumor Tissue vs. Colon Metastasis) | 8 | 0 | 8.12 | |
| | | 15, 16 (Normal Colon vs. Colon Tumor Tissue) | 0 | 8 | | 7.57 |
| 2042 | 450323 | 15, 17 (Normal Colon Tissue vs. Colon Metastasis) | 0 | 8 | | 7.45 |
| 2043 | 4652 | 03, 04 (Breast, High Met vs. Breast, Non-Met) | 16 | 2 | 7.81 | |
| 2044 | 553316 | 15, 16 (Normal Colon vs. Colon Tumor Tissue) | 12 | 3 | 4.23 | |
| 2045 | 642604 | 15, 17 (Normal Colon Tissue vs. Colon Metastasis) | 10 | 0 | 10.73 | |
| | | 16, 17 (Colon Tumor Tissue vs. Colon Metastasis) | 13 | 0 | 13.2 | |
| 2046 | 553316 | 15, 16 (Normal Colon vs. Colon Tumor Tissue) | 12 | 3 | 4.23 | |
| 2047 | 4097 | 03, 04 (Breast, High Met vs. Breast, Non-Met) | 20 | 43 | | 2.2 |
| 2048 | 6818 | 15, 17 (Normal Colon Tissue vs. Colon Metastasis) | 24 | 8 | 3.22 | |
| | | 15, 16 (Normal Colon vs. Colon Tumor Tissue) | 24 | 10 | 2.54 | |
| 2049 | 395341 | 15, 16 (Normal Colon vs. Colon Tumor Tissue) | 0 | 7 | | 6.62 |
| 2050 | 649143 | 15, 17 (Normal Colon Tissue vs. Colon Metastasis) | 6 | 0 | 6.44 | |
| | | 15, 16 (Normal Colon vs. Colon Tumor Tissue) | 6 | 0 | 6.34 | |
| 2051 | 649143 | 15, 17 (Normal Colon Tissue vs. Colon Metastasis) | 6 | 0 | 6.44 | |
| | | 15, 16 (Normal Colon vs. Colon Tumor Tissue) | 6 | 0 | 6.34 | |
| 2052 | 648310 | 15, 17 (Normal Colon Tissue vs. Colon Metastasis) | 6 | 0 | 6.44 | |
| | | 15, 16 (Normal Colon vs. Colon Tumor Tissue) | 6 | 0 | 6.34 | |
| 2053 | 447574 | 15, 17 (Normal Colon Tissue vs. Colon Metastasis) | 7 | 0 | 7.51 | |
| 2054 | 648931 | 15, 17 (Normal Colon Tissue vs. Colon Metastasis) | 9 | 0 | 9.66 | |
| 2055 | 6878 | 03, 04 (Breast, High Met vs. Breast, Non-Met) | 2 | 11 | | 5.64 |
| 2056 | 452238 | 15, 16 (Normal Colon vs. Colon Tumor Tissue) | 0 | 6 | | 5.68 |
| 2057 | 1870 | 01, 02 (Colon, High Met vs. Colon, Low Met) | 11 | 31 | | 3.06 |
| | | 03, 04 (Breast, High Met vs. Breast, Non-Met) | 12 | 3 | 3.9 | |
| 2058 | 559259 | 15, 16 (Normal Colon vs. Colon Tumor Tissue) | 17 | 5 | 3.59 | |
| | | 16, 17 (Colon Tumor Tissue vs. Colon Metastasis) | 5 | 21 | | 4.14 |
| 2059 | 453457 | 16, 17 (Colon Tumor Tissue vs. Colon Metastasis) | 1 | 8 | | 7.88 |
| 2060 | 8868 | 08, 09 (Lung, High Met vs. Lung, Low Met) | 5 | 0 | 6.99 | |
| | | 03, 04 (Breast, High Met vs. Breast, Non-Met) | 9 | 1 | 8.78 | |
| 2061 | 453059 | 15, 17 (Normal Colon Tissue vs. Colon Metastasis) | 9 | 0 | 9.66 | |
| | | 15, 16 (Normal Colon vs. Colon Tumor Tissue) | 9 | 1 | 9.51 | |
| 2062 | 236368 | 18, 19 (Normal Colon Tissue vs. Colon Tumor) | 9 | 1 | 10.29 | |
| | | 15, 17 (Normal Colon Tissue vs. Colon Metastasis) | 271 | 0 | 290.88 | |
| | | 18, 20 (Normal Colon Tissue vs. Colon Metastasis) | 9 | 0 | 7.69 | |
| | | 15, 16 (Normal Colon vs. Colon Tumor Tissue) | 271 | 16 | 17.9 | |
| | | 16, 17 (Colon Tumor Tissue vs. Colon Metastasis) | 16 | 0 | 16.25 | |
| 2063 | 453059 | 15, 16 (Normal Colon vs. Colon Tumor Tissue) | 9 | 1 | 9.51 | |
| | | 15, 17 (Normal Colon Tissue vs. Colon Metastasis) | 9 | 0 | 9.66 | |
| 2064 | 549979 | 16, 17 (Colon Tumor Tissue vs. Colon Metastasis) | 0 | 7 | | 6.89 |
| 2065 | 515631 | 15, 16 (Normal Colon vs. Colon Tumor Tissue) | 0 | 6 | | 5.68 |
| 2066 | 2235 | 03, 04 (Breast, High Met vs. Breast, Non-Met) | 36 | 12 | 2.93 | |
| 2067 | 448193 | 15, 16 (Normal Colon vs. Colon Tumor Tissue) | 1 | 10 | | 9.46 |
| | | 16, 17 (Colon Tumor Tissue vs. Colon Metastasis) | 10 | 2 | 5.08 | |
| 2068 | 530774 | 15, 17 (Normal Colon Tissue vs. Colon Metastasis) | 5 | 16 | | 2.98 |
| 2069 | 650204 | 15, 17 (Normal Colon Tissue vs. Colon Metastasis) | 11 | 0 | 11.81 | |
| 2070 | 644240 | 15, 17 (Normal Colon Tissue vs. Colon Metastasis) | 7 | 0 | 7.51 | |
| 2071 | 552614 | 16, 17 (Colon Tumor Tissue vs. Colon Metastasis) | 0 | 7 | | 6.89 |
| 2072 | 727331 | 16, 17 (Colon Tumor Tissue vs. Colon Metastasis) | 6 | 0 | 6.09 | |
| | | 15, 16 (Normal Colon vs. Colon Tumor Tissue) | 0 | 6 | | 5.68 |
| 2073 | 185457 | 03, 04 (Breast, High Met vs. Breast, Non-Met) | 0 | 18 | | 18.45 |
| 2074 | 454531 | 16, 17 (Colon Tumor Tissue vs. Colon Metastasis) | 1 | 9 | | 8.86 |
| 2075 | 643485 | 15, 16 (Normal Colon vs. Colon Tumor Tissue) | 9 | 1 | 9.51 | |
| | | 15, 17 (Normal Colon Tissue vs. Colon Metastasis) | 9 | 0 | 9.66 | |
| 2076 | 733669 | 15, 16 (Normal Colon vs. Colon Tumor Tissue) | 0 | 6 | | 5.68 |
| | | 16, 17 (Colon Tumor Tissue vs. Colon Metastasis) | 6 | 0 | 6.09 | |
| 2077 | 452344 | 15, 16 (Normal Colon vs. Colon Tumor Tissue) | 0 | 6 | | 5.68 |
| 2078 | 63602 | 16, 17 (Colon Tumor Tissue vs. Colon Metastasis) | 0 | 6 | | 5.91 |
| 2079 | 454155 | 15, 16 (Normal Colon vs. Colon Tumor Tissue) | 12 | 2 | 6.34 | |
| 2080 | 549903 | 16, 17 (Colon Tumor Tissue vs. Colon Metastasis) | 1 | 8 | | 7.88 |
| 2081 | 515631 | 15, 16 (Normal Colon vs. Colon Tumor Tissue) | 0 | 6 | | 5.68 |
| 2082 | 6878 | 03, 04 (Breast, High Met vs. Breast, Non-Met) | 2 | 11 | | 5.64 |
| 2083 | 2977 | 03, 04 (Breast, High Met vs. Breast, Non-Met) | 15 | 4 | 3.66 | |
| 2084 | 553823 | 15, 16 (Normal Colon vs. Colon Tumor Tissue) | 24 | 7 | 3.62 | |
| | | 15, 17 (Normal Colon Tissue vs. Colon Metastasis) | 24 | 6 | 4.29 | |
| 2085 | 3070 | 16, 17 (Colon Tumor Tissue vs. Colon Metastasis) | 0 | 6 | | 5.91 |
| 2086 | 728884 | 15, 16 (Normal Colon vs. Colon Tumor Tissue) | 0 | 8 | | 7.57 |
| | | 16, 17 (Colon Tumor Tissue vs. Colon Metastasis) | 8 | 0 | 8.12 | |
| 2087 | 8166 | 16, 17 (Colon Tumor Tissue vs. Colon Metastasis) | 6 | 0 | 6.09 | |
| 2088 | 644190 | 16, 17 (Colon Tumor Tissue vs. Colon Metastasis) | 6 | 0 | 6.09 | |
| 2089 | 733669 | 15, 16 (Normal Colon vs. Colon Tumor Tissue) | 0 | 6 | | 5.68 |
| | | 16, 17 (Colon Tumor Tissue vs. Colon Metastasis) | 6 | 0 | 6.09 | |
| 2090 | 728273 | 15, 16 (Normal Colon vs. Colon Tumor Tissue) | 0 | 7 | | 6.62 |
| | | 16, 17 (Colon Tumor Tissue vs. Colon Metastasis) | 7 | 0 | 7.11 | |
| 2091 | 406499 | 15, 16 (Normal Colon vs. Colon Tumor Tissue) | 6 | 0 | 6.34 | |
| | | 15, 17 (Normal Colon Tissue vs. Colon Metastasis) | 6 | 0 | 6.44 | |
| 2092 | 557720 | 16, 17 (Colon Tumor Tissue vs. Colon Metastasis) | 0 | 6 | | 5.91 |
| 2093 | 732050 | 16, 17 (Colon Tumor Tissue vs. Colon Metastasis) | 8 | 0 | 8.12 | |
| | | 15, 16 (Normal Colon vs. Colon Tumor Tissue) | 0 | 8 | | 7.57 |
| 2094 | 450867 | 15, 16 (Normal Colon vs. Colon Tumor Tissue) | 7 | 0 | 7.4 | |
| 2095 | 650297 | 15, 17 (Normal Colon Tissue vs. Colon Metastasis) | 6 | 0 | 6.44 | |
| 2096 | 448064 | 15, 16 (Normal Colon vs. Colon Tumor Tissue) | 11 | 3 | 3.88 | |
| 2097 | 452530 | 15, 16 (Normal Colon vs. Colon Tumor Tissue) | 10 | 2 | 5.28 | |
| 2098 | 7592 | 01, 02 (Colon, High Met vs. Colon, Low Met) | 0 | 7 | | 7.59 |
| 2099 | 733669 | 15, 16 (Normal Colon vs. Colon Tumor Tissue) | 0 | 6 | | 5.68 |
| | | 16, 17 (Colon Tumor Tissue vs. Colon Metastasis) | 6 | 0 | 6.09 | |
| 2100 | 11028 | 01, 02 (Colon, High Met vs. Colon, Low Met) | 0 | 6 | | 6.5 |
| 2101 | 1013 | 01, 02 (Colon, High Met vs. Colon, Low Met) | 40 | 84 | | 2.28 |
| | | 15, 16 (Normal Colon vs. Colon Tumor Tissue) | 6 | 0 | 6.34 | |
| | | 15, 17 (Normal Colon Tissue vs. Colon Metastasis) | 6 | 0 | 6.44 | |
| 2102 | 549265 | 15, 16 (Normal Colon vs. Colon Tumor Tissue) | 11 | 3 | 3.88 | |
| 2103 | 376600 | 15, 16 (Normal Colon vs. Colon Tumor Tissue) | 0 | 7 | | 6.62 |
| 2104 | 643804 | 15, 16 (Normal Colon vs. Colon Tumor Tissue) | 6 | 0 | 6.34 | |
| | | 15, 17 (Normal Colon Tissue vs. Colon Metastasis) | 6 | 0 | 6.44 | |
| 2105 | 454927 | 16, 17 (Colon Tumor Tissue vs. Colon Metastasis) | 3 | 14 | | 4.6 |
| 2106 | 446528 | 15, 16 (Normal Colon vs. Colon Tumor Tissue) | 10 | 0 | 10.57 | |
| 2107 | 2218 | 01, 02 (Colon, High Met vs. Colon, Low Met) | 2 | 21 | | 11.38 |
| | | 08, 09 (Lung, High Met vs. Lung, Low Met) | 5 | 0 | 6.99 | |
| | | 03, 04 (Breast, High Met vs. Breast, Non-Met) | 27 | 8 | 3.29 | |
| 2108 | 452704 | 15, 16 (Normal Colon vs. Colon Tumor Tissue) | 10 | 1 | 10.57 | |
| 2109 | 84895 | 16, 17 (Colon Tumor Tissue vs. Colon Metastasis) | 46 | 120 | | 2.57 |
| | | 08, 09 (Lung, High Met vs. Lung, Low Met) | 0 | 12 | | 8.59 |
| | | 15, 17 (Normal Colon Tissue vs. Colon Metastasis) | 24 | 120 | | 4.66 |
| 2110 | 157629 | 03, 04 (Breast, High Met vs. Breast, Non-Met) | 3 | 18 | | 6.15 |
| 2111 | 2930 | 01, 02 (Colon, High Met vs. Colon, Low Met) | 3 | 14 | | 5.06 |
| 2112 | 7037 | 01, 02 (Colon, High Met vs. Colon, Low Met) | 0 | 9 | | 9.76 |
| 2113 | 559806 | 16, 17 (Colon Tumor Tissue vs. Colon Metastasis) | 0 | 6 | | 5.91 |
| 2114 | 452076 | 23, 24 (Normal Lung Tissue vs. Lung Tumor Tissue) | 11 | 1 | 11.11 | |
| | | 16, 17 (Colon Tumor Tissue vs. Colon Metastasis) | 20 | 7 | 2.9 | |
| 2115 | 454869 | 16, 17 (Colon Tumor Tissue vs. Colon Metastasis) | 7 | 0 | 7.11 | |
| 2116 | 559674 | 15, 17 (Normal Colon Tissue vs. Colon Metastasis) | 0 | 7 | | 6.52 |
| 2117 | 2235 | 03, 04 (Breast, High Met vs. Breast, Non-Met) | 36 | 12 | 2.93 | |
| 2118 | 7545 | 01, 02 (Colon, High Met vs. Colon, Low Met) | 9 | 0 | 8.3 | |
| 2119 | 729173 | 15, 16 (Normal Colon vs. Colon Tumor Tissue) | 0 | 8 | | 7.57 |
| | | 16, 17 (Colon Tumor Tissue vs. Colon Metastasis) | 8 | 0 | 8.12 | |
| 2120 | 650448 | 15, 17 (Normal Colon Tissue vs. Colon Metastasis) | 7 | 0 | 7.51 | |
| 2121 | 172013 | 15, 16 (Normal Colon vs. Colon Tumor Tissue) | 6 | 0 | 6.34 | |
| 2122 | 651088 | 15, 17 (Normal Colon Tissue vs. Colon Metastasis) | 6 | 0 | 6.44 | |
| 2123 | 651088 | 15, 17 (Normal Colon Tissue vs. Colon Metastasis) | 6 | 0 | 6.44 | |
| 2124 | 726810 | 15, 16 (Normal Colon vs. Colon Tumor Tissue) | 0 | 7 | | 6.62 |
| | | 16, 17 (Colon Tumor Tissue vs. Colon Metastasis) | 7 | 0 | 7.11 | |
| 2125 | 406499 | 15, 16 (Normal Colon vs. Colon Tumor Tissue) | 6 | 0 | 6.34 | |
| | | 15, 17 (Normal Colon Tissue vs. Colon Metastasis) | 6 | 0 | 6.44 | |
| 2126 | 556325 | 16, 17 (Colon Tumor Tissue vs. Colon Metastasis) | 1 | 8 | | 7.88 |
| 2127 | 644836 | 15, 16 (Normal Colon vs. Colon Tumor Tissue) | 8 | 0 | 8.46 | |
| | | 15, 17 (Normal Colon Tissue vs. Colon Metastasis) | 8 | 0 | 8.59 | |
| 2128 | 649062 | 15, 17 (Normal Colon Tissue vs. Colon Metastasis) | 6 | 0 | 6.44 | |
| | | 15, 16 (Normal Colon vs. Colon Tumor Tissue) | 6 | 0 | 6.34 | |
| 2129 | 454776 | 15, 16 (Normal Colon vs. Colon Tumor Tissue) | 5 | 20 | | 3.78 |
| 2130 | 377579 | 21, 22 (Normal Prostate vs. Prostate Cancer) | 25 | 53 | | 2.16 |
| | | 15, 17 (Normal Colon Tissue vs. Colon Metastasis) | 2 | 13 | | 6.06 |
| 2131 | 728131 | 15, 16 (Normal Colon vs. Colon Tumor Tissue) | 0 | 6 | | 5.68 |
| | | 16, 17 (Colon Tumor Tissue vs. Colon Metastasis) | 6 | 0 | 6.09 | |
| 2132 | 475203 | 15, 17 (Normal Colon Tissue vs. Colon Metastasis) | 1 | 14 | | 13.04 |
| | | 15, 16 (Normal Colon vs. Colon Tumor Tissue) | 1 | 12 | | 11.35 |
| 2133 | 727314 | 16, 17 (Colon Tumor Tissue vs. Colon Metastasis) | 7 | 0 | 7.11 | |
| | | 15, 16 (Normal Colon vs. Colon Tumor Tissue) | 0 | 7 | | 6.62 |
| 2134 | 552025 | 15, 16 (Normal Colon vs. Colon Tumor Tissue) | 19 | 6 | 3.35 | |
| 2135 | 561382 | 15, 16 (Normal Colon vs. Colon Tumor Tissue) | 12 | 2 | 6.34 | |
| 2136 | 732579 | 16, 17 (Colon Tumor Tissue vs. Colon Metastasis) | 6 | 0 | 6.09 | |
| | | 15, 16 (Normal Colon vs. Colon Tumor Tissue) | 0 | 6 | | 5.68 |
| 2137 | 167 | 15, 16 (Normal Colon vs. Colon Tumor Tissue) | 7 | 19 | | 2.57 |
| 2138 | 185585 | 03, 04 (Breast, High Met vs. Breast, Non-Met) | 0 | 8 | | 8.2 |
| 2139 | 728131 | 15, 16 (Normal Colon vs. Colon Tumor Tissue) | 0 | 6 | | 5.68 |
| | | 16, 17 (Colon Tumor Tissue vs. Colon Metastasis) | 6 | 0 | 6.09 | |
| 2140 | 475203 | 15, 17 (Normal Colon Tissue vs. Colon Metastasis) | 1 | 14 | | 13.04 |
| | | 15, 16 (Normal Colon vs. Colon Tumor Tissue) | 1 | 12 | | 11.35 |
| 2141 | 724616 | 16, 17 (Colon Tumor Tissue vs. Colon Metastasis) | 8 | 0 | 8.12 | |
| | | 15, 16 (Normal Colon vs. Colon Tumor Tissue) | 0 | 8 | | 7.57 |
| 2143 | 645222 | 16, 17 (Colon Tumor Tissue vs. Colon Metastasis) | 11 | 0 | 11.17 | |
| 2144 | 400362 | 16, 17 (Colon Tumor Tissue vs. Colon Metastasis) | 35 | 117 | | 3.29 |
| | | 15, 17 (Normal Colon Tissue vs. Colon Metastasis) | 21 | 117 | | 5.19 |
| 2145 | 646583 | 15, 17 (Normal Colon Tissue vs. Colon Metastasis) | 7 | 0 | 7.51 | |
| 2146 | 475203 | 15, 17 (Normal Colon Tissue vs. Colon Metastasis) | 1 | 14 | | 13.04 |
| | | 15, 16 (Normal Colon vs. Colon Tumor Tissue) | 1 | 12 | | 11.35 |
| 2147 | 550001 | 16, 17 (Colon Tumor Tissue vs. Colon Metastasis) | 10 | 2 | 5.08 | |
| 2148 | 640703 | 16, 17 (Colon Tumor Tissue vs. Colon Metastasis) | 10 | 0 | 10.16 | |
| 2149 | 646583 | 15, 17 (Normal Colon Tissue vs. Colon Metastasis) | 7 | 0 | 7.51 | |
| 2150 | 449468 | 15, 17 (Normal Colon Tissue vs. Colon Metastasis) | 2 | 11 | | 5.12 |
| 2151 | 449468 | 15, 17 (Normal Colon Tissue vs. Colon Metastasis) | 2 | 11 | | 5.12 |
| 2152 | 551628 | 15, 16 (Normal Colon vs. Colon Tumor Tissue) | 38 | 5 | 8.03 | |
| | | 15, 17 (Normal Colon Tissue vs. Colon Metastasis) | 38 | 13 | 3.14 | |
| 2153 | 449468 | 15, 17 (Normal Colon Tissue vs. Colon Metastasis) | 2 | 11 | | 5.12 |
| 2154 | 417259 | 16, 17 (Colon Tumor Tissue vs. Colon Metastasis) | 1 | 14 | | 13.79 |
| | | 15, 17 (Normal Colon Tissue vs. Colon Metastasis) | 4 | 14 | | 3.26 |
| 2155 | 448029 | 16, 17 (Colon Tumor Tissue vs. Colon Metastasis) | 10 | 1 | 10.16 | |
| 2156 | 524363 | 16, 17 (Colon Tumor Tissue vs. Colon Metastasis) | 0 | 6 | | 5.91 |
| 2157 | 446531 | 16, 17 (Colon Tumor Tissue vs. Colon Metastasis) | 0 | 6 | | 5.91 |
| 2158 | 561359 | 15, 16 (Normal Colon vs. Colon Tumor Tissue) | 12 | 2 | 6.34 | |
| | | 15, 17 (Normal Colon Tissue vs. Colon Metastasis) | 12 | 3 | 4.29 | |
| 2159 | 711297 | 15, 16 (Normal Colon vs. Colon Tumor Tissue) | 1 | 11 | | 10.41 |
| | | 16, 17 (Colon Tumor Tissue vs. Colon Metastasis) | 11 | 0 | 11.17 | |
| 2160 | 650097 | 16, 17 (Colon Tumor Tissue vs. Colon Metastasis) | 6 | 0 | 6.09 | |
| 2161 | 495715 | 16, 17 (Colon Tumor Tissue vs. Colon Metastasis) | 0 | 8 | | 7.88 |
| 2162 | 734685 | 16, 17 (Colon Tumor Tissue vs. Colon Metastasis) | 6 | 0 | 6.09 | |
| | | 15, 16 (Normal Colon vs. Colon Tumor Tissue) | 0 | 6 | | 5.68 |
| 2163 | 560515 | 16, 17 (Colon Tumor Tissue vs. Colon Metastasis) | 0 | 6 | | 5.91 |
| 2164 | 3441 | 03, 04 (Breast, High Met vs. Breast, Non-Met) | 8 | 0 | 7.81 | |
| | | 01, 02 (Colon, High Met vs. Colon, Low Met) | 4 | 13 | | 3.52 |
| 2165 | 729273 | 15, 16 (Normal Colon vs. Colon Tumor Tissue) | 0 | 7 | | 6.62 |
| | | 16, 17 (Colon Tumor Tissue vs. Colon Metastasis) | 7 | 0 | 7.11 | |
| 2166 | 557039 | 16, 17 (Colon Tumor Tissue vs. Colon Metastasis) | 2 | 16 | | 7.88 |
| | | 15, 16 (Normal Colon vs. Colon Tumor Tissue) | 11 | 2 | 5.81 | |
| 2167 | 711297 | 15, 16 (Normal Colon vs. Colon Tumor Tissue) | 1 | 11 | | 10.41 |
| | | 16, 17 (Colon Tumor Tissue vs. Colon Metastasis) | 11 | 0 | 11.17 | |
| 2168 | 711297 | 15, 16 (Normal Colon vs. Colon Tumor Tissue) | 1 | 11 | | 10.41 |
| | | 16, 17 (Colon Tumor Tissue vs. Colon Metastasis) | 11 | 0 | 11.17 | |
| 2169 | 2860 | 15, 16 (Normal Colon vs. Colon Tumor Tissue) | 1 | 13 | | 12.3 |
| | | 15, 17 (Normal Colon Tissue vs. Colon Metastasis) | 1 | 13 | | 12.11 |
| | | 03, 04 (Breast, High Met vs. Breast, Non-Met) | 1 | 48 | | 49.2 |
| | | 01, 02 (Colon, High Met vs. Colon, Low Met) | 23 | 9 | 2.36 | |
| 2170 | 558534 | 16, 17 (Colon Tumor Tissue vs. Colon Metastasis) | 0 | 7 | | 6.89 |
| 2171 | 711297 | 16, 17 (Colon Tumor Tissue vs. Colon Metastasis) | 11 | 0 | 11.17 | |
| | | 15, 16 (Normal Colon vs. Colon Tumor Tissue) | 1 | 11 | | 10.41 |
| 2172 | 378457 | 15, 16 (Normal Colon vs. Colon Tumor Tissue) | 1 | 9 | | 8.51 |
| 2173 | 646583 | 15, 17 (Normal Colon Tissue vs. Colon Metastasis) | 7 | 0 | 7.51 | |
| 2174 | 646583 | 15, 17 (Normal Colon Tissue vs. Colon Metastasis) | 7 | 0 | 7.51 | |
| 2175 | 1996 | 16, 17 (Colon Tumor Tissue vs. Colon Metastasis) | 13 | 4 | 3.3 | |
| | | 03, 04 (Breast, High Met vs. Breast, Non-Met) | 34 | 139 | | 4.19 |
| | | 15, 16 (Normal Colon vs. Colon Tumor Tissue) | 2 | 13 | | 6.15 |
| | | 08, 09 (Lung, High Met vs. Lung, Low Met) | 20 | 13 | 2.15 | |
| 2176 | 7962 | 03, 04 (Breast, High Met vs. Breast, Non-Met) | 7 | 0 | 6.83 | |
| 2177 | 645139 | 16, 17 (Colon Tumor Tissue vs. Colon Metastasis) | 9 | 0 | 9.14 | |
| 2178 | 449468 | 15, 17 (Normal Colon Tissue vs. Colon Metastasis) | 2 | 11 | | 5.12 |
| 2179 | 9898 | 03, 04 (Breast, High Met vs. Breast, Non-Met) | 4 | 14 | | 3.59 |
| 2180 | 406499 | 15, 16 (Normal Colon vs. Colon Tumor Tissue) | 6 | 0 | 6.34 | |
| | | 15, 17 (Normal Colon Tissue vs. Colon Metastasis) | 6 | 0 | 6.44 | |
| 2181 | 1257 | 01, 02 (Colon, High Met vs. Colon, Low Met) | 46 | 20 | 2.12 | |
| | | 21, 22 (Normal Prostate vs. Prostate Cancer) | 6 | 42 | | 7.12 |
| 2182 | 549903 | 16, 17 (Colon Tumor Tissue vs. Colon Metastasis) | 1 | 8 | | 7.88 |
| 2183 | 557906 | 15, 16 (Normal Colon vs. Colon Tumor Tissue) | 12 | 3 | 4.23 | |
| 2184 | 3538 | 01, 02 (Colon, High Met vs. Colon, Low Met) | 18 | 5 | 3.32 | |
| 2185 | 3114 | 03, 04 (Breast, High Met vs. Breast, Non-Met) | 9 | 1 | 8.78 | |
| 2186 | 426895 | 15, 17 (Normal Colon Tissue vs. Colon Metastasis) | 2 | 18 | | 8.38 |
| 2187 | 923 | 15, 16 (Normal Colon vs. Colon Tumor Tissue) | 7 | 23 | | 3.11 |
| | | 16, 17 (Colon Tumor Tissue vs. Colon Metastasis) | 23 | 9 | 2.6 | |
| 2188 | 645194 | 15, 17 (Normal Colon Tissue vs. Colon Metastasis) | 7 | 0 | 7.51 | |
| 2189 | 550161 | 15, 16 (Normal Colon vs. Colon Tumor Tissue) | 4 | 15 | | 3.55 |
| 2190 | 650119 | 15, 17 (Normal Colon Tissue vs. Colon Metastasis) | 7 | 0 | 7.51 | |
| 2191 | 642142 | 16, 17 (Colon Tumor Tissue vs. Colon Metastasis) | 11 | 0 | 11.17 | |
| | | 15, 16 (Normal Colon vs. Colon Tumor Tissue) | 2 | 11 | | 5.2 |
| 2192 | 419255 | 15, 17 (Normal Colon Tissue vs. Colon Metastasis) | 11 | 1 | 11.81 | |
| | | 15, 16 (Normal Colon vs. Colon Tumor Tissue) | 11 | 0 | 11.63 | |
| 2193 | 552905 | 15, 17 (Normal Colon Tissue vs. Colon Metastasis) | 0 | 7 | | 6.52 |
| 2194 | 511997 | 16, 17 (Colon Tumor Tissue vs. Colon Metastasis) | 0 | 6 | | 5.91 |
| 2195 | 551434 | 15, 16 (Normal Colon vs. Colon Tumor Tissue) | 40 | 13 | 3.25 | |
| | | 15, 17 (Normal Colon Tissue vs. Colon Metastasis) | 40 | 6 | 7.16 | |
| 2196 | 727447 | 16, 17 (Colon Tumor Tissue vs. Colon Metastasis) | 6 | 0 | 6.09 | |
| | | 15, 16 (Normal Colon vs. Colon Tumor Tissue) | 0 | 6 | | 5.68 |
| 2197 | 378786 | 16, 17 (Colon Tumor Tissue vs. Colon Metastasis) | 0 | 9 | | 8.86 |
| 2198 | 649152 | 15, 17 (Normal Colon Tissue vs. Colon Metastasis) | 6 | 0 | 6.44 | |
| 2199 | 18853 | 16, 17 (Colon Tumor Tissue vs. Colon Metastasis) | 0 | 6 | | 5.91 |
| 2200 | 643481 | 15, 17 (Normal Colon Tissue vs. Colon Metastasis) | 6 | 0 | 6.44 | |
| 2201 | 644417 | 16, 17 (Colon Tumor Tissue vs. Colon Metastasis) | 6 | 0 | 6.09 | |
| 2202 | 726788 | 16, 17 (Colon Tumor Tissue vs. Colon Metastasis) | 6 | 0 | 6.09 | |
| | | 15, 16 (Normal Colon vs. Colon Tumor Tissue) | 0 | 6 | | 5.68 |
| 2203 | 206 | 08, 09 (Lung, High Met vs. Lung, Low Met) | 19 | 4 | 6.64 | |
| | | 03, 04 (Breast, High Met vs. Breast, Non-Met) | 166 | 79 | 2.05 | |
| 2204 | 395930 | 15, 17 (Normal Colon Tissue vs. Colon Metastasis) | 6 | 0 | 6.44 | |
| 2205 | 185589 | 03, 04 (Breast, High Met vs. Breast, Non-Met) | 0 | 9 | | 9.22 |
| 2206 | 1441 | 01, 02 (Colon, High Met vs. Colon, Low Met) | 9 | 40 | | 4.82 |
| | | 03, 04 (Breast, High Met vs. Breast, Non-Met) | 38 | 16 | 2.32 | |
| 2207 | 14522 | 03, 04 (Breast, High Met vs. Breast, Non-Met) | 0 | 8 | | 8.2 |
| 2208 | 203605 | 15, 16 (Normal Colon vs. Colon Tumor Tissue) | 17 | 7 | 2.57 | |
| 2209 | 551527 | 15, 17 (Normal Colon Tissue vs. Colon Metastasis) | 0 | 7 | | 6.52 |
| 2210 | 4509 | 08, 09 (Lung, High Met vs. Lung, Low Met) | 36 | 22 | 2.29 | |
| | | 03, 04 (Breast, High Met vs. Breast, Non-Met) | 1 | 40 | | 41 |
| 2211 | 447737 | 15, 16 (Normal Colon vs. Colon Tumor Tissue) | 19 | 6 | 3.35 | |
| 2212 | 447388 | 18, 20 (Normal Colon Tissue vs. Colon Metastasis) | 18 | 0 | 15.39 | |
| | | 15, 16 (Normal Colon vs. Colon Tumor Tissue) | 142 | 2 | 75.05 | |
| | | 15, 17 (Normal Colon Tissue vs. Colon Metastasis) | 142 | 4 | 38.1 | |
| | | 18, 19 (Normal Colon Tissue vs. Colon Tumor) | 18 | 0 | 20.57 | |
| 2213 | 451932 | 15, 17 (Normal Colon Tissue vs. Colon Metastasis) | 28 | 4 | 7.51 | |
| | | 16, 17 (Colon Tumor Tissue vs. Colon Metastasis) | 15 | 4 | 3.81 | |
| 2214 | 559043 | 16, 17 (Colon Tumor Tissue vs. Colon Metastasis) | 11 | 50 | | 4.48 |
| | | 15, 16 (Normal Colon vs. Colon Tumor Tissue) | 54 | 11 | 5.19 | |
| 2215 | 380634 | 16, 17 (Colon Tumor Tissue vs. Colon Metastasis) | 3 | 14 | | 4.6 |
| 2216 | 495715 | 16, 17 (Colon Tumor Tissue vs. Colon Metastasis) | 0 | 8 | | 7.88 |
| 2217 | 451932 | 15, 17 (Normal Colon Tissue vs. Colon Metastasis) | 28 | 4 | 7.51 | |
| | | 16, 17 (Colon Tumor Tissue vs. Colon Metastasis) | 15 | 4 | 3.81 | |
| 2218 | 447939 | 15, 16 (Normal Colon vs. Colon Tumor Tissue) | 14 | 1 | 14.8 | |
| | | 16, 17 (Colon Tumor Tissue vs. Colon Metastasis) | 1 | 8 | | 7.88 |
| 2219 | 1181 | 03, 04 (Breast, High Met vs. Breast, Non-Met) | 17 | 58 | | 3.5 |
| 2220 | 376600 | 15, 16 (Normal Colon vs. Colon Tumor Tissue) | 0 | 7 | | 6.62 |
| 2221 | 234761 | 15, 17 (Normal Colon Tissue vs. Colon Metastasis) | 8 | 0 | 8.59 | |
| 2222 | 644417 | 16, 17 (Colon Tumor Tissue vs. Colon Metastasis) | 6 | 0 | 6.09 | |
| 2223 | 639048 | 15, 17 (Normal Colon Tissue vs. Colon Metastasis) | 7 | 0 | 7.51 | |
| 2224 | 11452 | 01, 02 (Colon, High Met vs. Colon, Low Met) | 0 | 6 | | 6.5 |
| 2225 | 452076 | 23, 24 (Normal Lung Tissue vs. Lung Tumor Tissue) | 11 | 1 | 11.11 | |
| | | 16, 17 (Colon Tumor Tissue vs. Colon Metastasis) | 20 | 7 | 2.9 | |
| 2226 | 644523 | 16, 17 (Colon Tumor Tissue vs. Colon Metastasis) | 6 | 0 | 6.09 | |
| 2227 | 554678 | 15, 16 (Normal Colon vs. Colon Tumor Tissue) | 10 | 2 | 5.28 | |
| 2228 | 3550 | 03, 04 (Breast, High Met vs. Breast, Non-Met) | 31 | 5 | 6.05 | |
| 2229 | 450311 | l5, 16 (Normal Colon vs. Colon Tumor Tissue) | 8 | 1 | 8.46 | |
| 2230 | 647280 | 16, 17 (Colon Tumor Tissue vs. Colon Metastasis) | 8 | 0 | 8.12 | |
| 2231 | 548858 | 16, 17 (Colon Tumor Tissue vs. Colon Metastasis) | 0 | 11 | | 10.83 |
| 2232 | 4204 | 01, 02 (Colon, High Met vs. Colon, Low Met) | 16 | 2 | 7.38 | |
| 2233 | 540690 | 23, 24 (Normal Lung Tissue vs. Lung Tumor Tissue) | 0 | 8 | | 7.92 |
| | | 16, 17 (Colon Tumor Tissue vs. Colon Metastasis) | 11 | 0 | 11.17 | |
| 2234 | 404774 | 15, 16 (Normal Colon vs. Colon Tumor Tissue) | 11 | 3 | 3.88 | |
| | | 15, 17 (Normal Colon Tissue vs. Colon Metastasis) | 11 | 1 | 11.81 | |
| 2235 | 557823 | 16, 17 (Colon Tumor Tissue vs. Colon Metastasis) | 0 | 9 | | 8.86 |
| | | 15, 17 (Normal Colon Tissue vs. Colon Metastasis) | 0 | 9 | | 8.38 |
| 2236 | 1458 | 03, 04 (Breast, High Met vs. Breast, Non-Met) | 20 | 3 | 6.5 | |
| 2237 | 485431 | 15, 16 (Normal Colon vs. Colon Tumor Tissue) | 0 | 6 | | 5.68 |
| 2238 | 2245 | 03, 04 (Breast, High Met vs. Breast, Non-Met) | 13 | 1 | 12.68 | |
| | | 01, 02 (Colon, High Met vs. Colon, Low Met) | 12 | 27 | | 2.44 |
| 2239 | 3242 | 01, 02 (Colon, High Met vs. Colon, Low Met) | 2 | 17 | | 9.22 |
| 2240 | 648747 | 15, 17 (Normal Colon Tissue vs. Colon Metastasis) | 6 | 0 | 6.44 | |
| | | 15, 16 (Normal Colon vs. Colon Tumor Tissue) | 6 | 0 | 6.34 | |
| 2241 | 3805 | 01, 02 (Colon, High Met vs. Colon, Low Met) | 17 | 3 | 5.23 | |
| 2242 | 475203 | 15, 16 (Normal Colon vs. Colon Tumor Tissue) | 1 | 12 | | 11.35 |
| | | 15, 17 (Normal Colon Tissue vs. Colon Metastasis) | 1 | 14 | | 13.04 |
| 2243 | 12018 | 03, 04 (Breast, High Met vs. Breast, Non-Met) | 0 | 6 | | 6.15 |
| 2244 | 475203 | 15, 16 (Normal Colon vs. Colon Tumor Tissue) | 1 | 12 | | 11.35 |
| | | 15, 17 (Normal Colon Tissue vs. Colon Metastasis) | 1 | 14 | | 13.04 |
| 2245 | 3805 | 01, 02 (Colon, High Met vs. Colon, Low Met) | 17 | 3 | 5.23 | |
| 2246 | 496132 | 15, 16 (Normal Colon vs. Colon Tumor Tissue) | 6 | 0 | 6.34 | |
| 2247 | 650600 | 15, 17 (Normal Colon Tissue vs. Colon Metastasis) | 6 | 0 | 6.44 | |
| 2248 | 650749 | 15, 17 (Normal Colon Tissue vs. Colon Metastasis) | 7 | 0 | 7.51 | |
| 2249 | 223148 | 15, 17 (Normal Colon Tissue vs. Colon Metastasis) | 1 | 9 | | 8.38 |
| 2250 | 449 | 15, 17 (Normal Colon Tissue vs. Colon Metastasis) | 3 | 14 | | 4.35 |
| | | 15, 16 (Normal Colon vs. Colon Tumor Tissue) | 3 | 14 | | 4.42 |
| 2251 | 735620 | 15, 16 (Normal Colon vs. Colon Tumor Tissue) | 0 | 6 | | 5.68 |
| | | 16, 17 (Colon Tumor Tissue vs. Colon Metastasis) | 6 | 0 | 6.09 | |
| 2252 | 650600 | 15, 17 (Normal Colon Tissue vs. Colon Metastasis) | 6 | 0 | 6.44 | |
| 2253 | 218 | 15, 17 (Normal Colon Tissue vs. Colon Metastasis) | 1 | 11 | | 10.25 |
| | | 03, 04 (Breast, High Met vs. Breast, Non-Met) | 127 | 49 | 2.53 | |
| 2254 | 4161 | 08, 09 (Lung, High Met vs. Lung, Low Met) | 31 | 2 | 21.66 | |
| | | 01, 02 (Colon, High Met vs. Colon, Low Met) | 13 | 1 | 11.99 | |
| 2255 | 373202 | 15, 17 (Normal Colon Tissue vs. Colon Metastasis) | 5 | 22 | | 4.1 |
| 2256 | 724339 | 15, 16 (Normal Colon vs. Colon Tumor Tissue) | 0 | 6 | | 5.68 |
| | | 16, 17 (Colon Tumor Tissue vs. Colon Metastasis) | 6 | 0 | 6.09 | |
| 2257 | 113291 | 15, 17 (Normal Colon Tissue vs. Colon Metastasis) | 2 | 15 | | 6.99 |
| 2258 | 736753 | 15, 16 (Normal Colon vs. Colon Tumor Tissue) | 0 | 11 | | 10.41 |
| | | 16, 17 (Colon Tumor Tissue vs. Colon Metastasis) | 11 | 0 | 11.17 | |
| 2259 | 650600 | 15, 17 (Normal Colon Tissue vs. Colon Metastasis) | 6 | 0 | 6.44 | |
| 2260 | 451569 | 15, 17 (Normal Colon Tissue vs. Colon Metastasis) | 0 | 8 | | 7.45 |
| 2261 | 1297 | 03, 04 (Breast, High Met vs. Breast, Non-Met) | 30 | 14 | 2.09 | |
| 2263 | 63602 | 16, 17 (Colon Tumor Tissue vs. Colon Metastasis) | 0 | 6 | | 5.91 |
| 2264 | 2757 | 03, 04 (Breast, High Met vs. Breast, Non-Met) | 4 | 16 | | 4.1 |
| 2265 | 373128 | 08, 09 (Lung, High Met vs. Lung, Low Met) | 4 | 29 | | 5.19 |
| | | 15, 17 (Normal Colon Tissue vs. Colon Metastasis) | 4 | 14 | | 3.26 |
| 2266 | 641479 | 16, 17 (Colon Tumor Tissue vs. Colon Metastasis) | 8 | 0 | 8.12 | |
| 2267 | 450380 | 15, 17 (Normal Colon Tissue vs. Colon Metastasis) | 4 | 31 | | 7.22 |
| | | 15, 16 (Normal Colon vs. Colon Tumor Tissue) | 4 | 23 | | 5.44 |
| 2268 | 133512 | 15, 17 (Normal Colon Tissue vs. Colon Metastasis) | 0 | 7 | | 6.52 |
| | | 18, 19 (Normal Colon Tissue vs. Colon Tumor) | 0 | 8 | | 7 |
| 2269 | 447211 | 18, 20 (Normal Colon Tissue vs. Colon Metastasis) | 9 | 0 | 7.69 | |
| | | 15, 17 (Normal Colon Tissue vs. Colon Metastasis) | 46 | 0 | 49.38 | |
| | | 15, 16 (Normal Colon vs. Colon Tumor Tissue) | 46 | 0 | 48.62 | |
| | | 18, 19 (Normal Colon Tissue vs. Colon Tumor) | 9 | 0 | 10.29 | |
| 2270 | 645222 | 16, 17 (Colon Tumor Tissue vs. Colon Metastasis) | 11 | 0 | 11.17 | |
| 2271 | 645222 | 16, 17 (Colon Tumor Tissue vs. Colon Metastasis) | 11 | 0 | 11.17 | |
| 2272 | 17372 | 15, 17 (Normal Colon Tissue vs. Colon Metastasis) | 7 | 0 | 7.51 | |
| 2273 | 451619 | 15, 16 (Normal Colon vs. Colon Tumor Tissue) | 24 | 9 | 2.82 | |
| | | 16, 17 (Colon Tumor Tissue vs. Colon Metastasis) | 9 | 39 | | 4.27 |
| 2274 | 2510 | 03, 04 (Breast, High Met vs. Breast, Non-Met) | 13 | 1 | 12.68 | |
| 2275 | 643974 | 15, 16 (Normal Colon vs. Colon Tumor Tissue) | 16 | 3 | 5.64 | |
| | | 15, 17 (Normal Colon Tissue vs. Colon Metastasis) | 16 | 0 | 17.17 | |
| 2276 | 500630 | 16, 17 (Colon Tumor Tissue vs. Colon Metastasis) | 6 | 0 | 6.09 | |
| 2277 | 3101 | 01, 02 (Colon, High Met vs. Colon, Low Met) | 4 | 19 | | 5.15 |
| 2278 | 446938 | 15, 16 (Normal Colon vs. Colon Tumor Tissue) | 8 | 1 | 8.46 | |
| 2279 | 554469 | 15, 17 (Normal Colon Tissue vs. Colon Metastasis) | 24 | 3 | 8.59 | |
| | | 15, 16 (Normal Colon vs. Colon Tumor Tissue) | 24 | 8 | 3.17 | |
| 2280 | 554469 | 15, 17 (Normal Colon Tissue vs. Colon Metastasis) | 24 | 3 | 8.59 | |
| | | 15, 16 (Normal Colon vs. Colon Tumor Tissue) | 24 | 8 | 3.17 | |
| 2281 | 2894 | 15, 16 (Normal Colon vs. Colon Tumor Tissue) | 0 | 6 | | 5.68 |
| | | 03, 04 (Breast, High Met vs. Breast, Non-Met) | 22 | 4 | 5.37 | |
| | | 08, 09 (Lung, High Met vs. Lung, Low Met) | 5 | 20 | | 2.86 |
| 2282 | 650600 | 15, 17 (Normal Colon Tissue vs. Colon Metastasis) | 6 | 0 | 6.44 | |
| 2283 | 3101 | 01, 02 (Colon, High Met vs. Colon, Low Met) | 4 | 19 | | 5.15 |
| 2284 | 554469 | 15, 17 (Normal Colon Tissue vs. Colon Metastasis) | 24 | 3 | 8.59 | |
| | | 15, 16 (Normal Colon vs. Colon Tumor Tissue) | 24 | 8 | 3.17 | |
| 2285 | 9910 | 03, 04 (Breast, High Met vs. Breast, Non-Met) | 6 | 0 | 5.85 | |
| 2286 | 400608 | 15, 17 (Normal Colon Tissue vs. Colon Metastasis) | 21 | 7 | 3.22 | |
| 2287 | 555051 | 15, 17 (Normal Colon Tissue vs. Colon Metastasis) | 0 | 8 | | 7.45 |
| | | 15, 16 (Normal Colon vs. Colon Tumor Tissue) | 0 | 9 | | 8.51 |
| 2288 | 185400 | 16, 17 (Colon Tumor Tissue vs. Colon Metastasis) | 1 | 9 | | 8.86 |
| | | 03, 04 (Breast, High Met vs. Breast, Non-Met) | 1 | 62 | | 63.55 |
| 2289 | 3059 | 03, 04 (Breast, High Met vs. Breast, Non-Met) | 16 | 3 | 5.2 | |
| 2290 | 647185 | 15, 17 (Normal Colon Tissue vs. Colon Metastasis) | 6 | 0 | 6.44 | |
| 2291 | 1669 | 21, 22 (Normal Prostate vs. Prostate Cancer) | 0 | 34 | | 34.57 |
| | | 03, 04 (Breast, High Met vs. Breast, Non-Met) | 40 | 0 | 39.03 | |
| | | 01, 02 (Colon, High Met vs. Colon, Low Met) | 11 | 29 | | 2.86 |
| 2292 | 7158 | 03, 04 (Breast, High Met vs. Breast, Non-Met) | 6 | 0 | 5.85 | |
| 2293 | 496132 | 15, 16 (Normal Colon vs. Colon Tumor Tissue) | 6 | 0 | 6.34 | |
| 2294 | 378623 | 15, 17 (Normal Colon Tissue vs. Colon Metastasis) | 3 | 33 | | 10.25 |
| | | 15, 16 (Normal Colon vs. Colon Tumor Tissue) | 3 | 24 | | 7.57 |
| | | 08, 09 (Lung, High Met vs. Lung, Low Met) | 1 | 16 | | 11.45 |
| 2295 | 1257 | 01, 02 (Colon, High Met vs. Colon, Low Met) | 46 | 20 | 2.12 | |
| | | 21, 22 (Normal Prostate vs. Prostate Cancer) | 6 | 42 | | 7.12 |
| 2296 | 648499 | 15, 17 (Normal Colon Tissue vs. Colon Metastasis) | 10 | 0 | 10.73 | |
| | | 15, 16 (Normal Colon vs. Colon Tumor Tissue) | 10 | 2 | 5.28 | |
| 2297 | 185627 | 03, 04 (Breast, High Met vs. Breast, Non-Met) | 0 | 7 | | 7.17 |
| 2298 | 640005 | 16, 17 (Colon Tumor Tissue vs. Colon Metastasis) | 6 | 0 | 6.09 | |
| | | 15, 16 (Normal Colon vs. Colon Tumor Tissue) | 20 | 6 | 3.52 | |
| | | 15, 17 (Normal Colon Tissue vs. Colon Metastasis) | 20 | 0 | 21.47 | |
| 2299 | 553462 | 15, 16 (Normal Colon vs. Colon Tumor Tissue) | 6 | 0 | 6.34 | |
| 2300 | 649852 | 15, 17 (Normal Colon Tissue vs. Colon Metastasis) | 6 | 0 | 6.44 | |
| 2301 | 422375 | 15, 17 (Normal Colon Tissue vs. Colon Metastasis) | 2 | 11 | | 5.12 |
| 2302 | 10910 | 01, 02 (Colon, High Met vs. Colon, Low Met) | 0 | 6 | | 6.5 |
| 2303 | 2737 | 16, 17 (Colon Tumor Tissue vs. Colon Metastasis) | 3 | 14 | | 4.6 |
| | | 15, 17 (Normal Colon Tissue vs. Colon Metastasis) | 4 | 14 | | 3.26 |
| 2304 | 3438 | 01, 02 (Colon, High Met vs. Colon, Low Met) | 5 | 14 | | 3.04 |
| 2305 | 3438 | 01, 02 (Colon, High Met vs. Colon, Low Met) | 5 | 14 | | 3.04 |
| 2306 | 3763 | 01, 02 (Colon, High Met vs. Colon, Low Met) | 19 | 6 | 2.92 | |
| 2307 | 648966 | 16, 17 (Colon Tumor Tissue vs. Colon Metastasis) | 6 | 0 | 6.09 | |
| 2308 | 724339 | 15, 16 (Normal Colon vs. Colon Tumor Tissue) | 0 | 6 | | 5.68 |
| | | 16, 17 (Colon Tumor Tissue vs. Colon Metastasis) | 6 | 0 | 6.09 | |
| 2309 | 451569 | 15, 17 (Normal Colon Tissue vs. Colon Metastasis) | 0 | 8 | | 7.45 |
| 2310 | 554109 | 15, 16 (Normal Colon vs. Colon Tumor Tissue) | 15 | 2 | 7.93 | |
| | | 16, 17 (Colon Tumor Tissue vs. Colon Metastasis) | 2 | 11 | | 5.42 |
| 2311 | 380339 | 15, 16 (Normal Colon vs. Colon Tumor Tissue) | 166 | 57 | 3.08 | |
| | | 15, 17 (Normal Colon Tissue vs. Colon Metastasis) | 166 | 51 | 3.49 | |
| | | 19, 20 (Colon Tumor Tissue vs. Colon Metastasis) | 9 | 0 | 6.73 | |
| | | 18, 20 (Normal Colon Tissue vs. Colon Metastasis) | 18 | 0 | 15.39 | |
| 2312 | 729903 | 16, 17 (Colon Tumor Tissue vs. Colon Metastasis) | 6 | 0 | 6.09 | |
| | | 15, 16 (Normal Colon vs. Colon Tumor Tissue) | 0 | 6 | | 5.68 |
| 2313 | 45 | 08, 09 (Lung, High Met vs. Lung, Low Met) | 374 | 1067 | | 2.04 |
| | | 15, 16 (Normal Colon vs. Colon Tumor Tissue) | 40 | 119 | | 2.81 |
| | | 15, 17 (Normal Colon Tissue vs. Colon Metastasis) | 40 | 209 | | 4.87 |
| | | 18, 19 (Normal Colon Tissue vs. Colon Tumor) | 0 | 29 | | 25.38 |
| | | 18, 20 (Normal Colon Tissue vs. Colon Metastasis) | 0 | 11 | | 12.87 |
| | | 03, 04 (Breast, High Met vs. Breast, Non-Met) | 649 | 1876 | | 2.96 |
| 2314 | 454653 | 15, 17 (Normal Colon Tissue vs. Colon Metastasis) | 3 | 17 | | 5.28 |
| | | 16, 17 (Colon Tumor Tissue vs. Colon Metastasis) | 5 | 17 | | 3.35 |
| 2315 | 11536 | 03, 04 (Breast, High Met vs. Breast, Non-Met) | 6 | 0 | 5.85 | |
| 2316 | 373134 | 08, 09 (Lung, High Met vs. Lung, Low Met) | 2 | 45 | | 16.1 |
| | | 15, 17 (Normal Colon Tissue vs. Colon Metastasis) | 24 | 73 | | 2.83 |
| | | 16, 17 (Colon Tumor Tissue vs. Colon Metastasis) | 28 | 73 | | 2.57 |
| 2317 | 185691 | 03, 04 (Breast, High Met vs. Breast, Non-Met) | 0 | 6 | | 6.15 |
| 2318 | 234761 | 15, 17 (Normal Colon Tissue vs. Colon Metastasis) | 8 | 0 | 8.59 | |
| 2319 | 724339 | 16, 17 (Colon Tumor Tissue vs. Colon Metastasis) | 6 | 0 | 6.09 | |
| | | 15, 16 (Normal Colon vs. Colon Tumor Tissue) | 0 | 6 | | 5.68 |
| 2320 | 732740 | 15, 16 (Normal Colon vs. Colon Tumor Tissue) | 0 | 6 | | 5.68 |
| | | 16, 17 (Colon Tumor Tissue vs. Colon Metastasis) | 6 | 0 | 6.09 | |
| 2321 | 35895 | 21, 22 (Normal Prostate vs. Prostate Cancer) | 6 | 19 | | 3.22 |
| | | 15, 16 (Normal Colon vs. Colon Tumor Tissue) | 1 | 13 | | 12.3 |
| | | 16, 17 (Colon Tumor Tissue vs. Colon Metastasis) | 13 | 0 | 13.2 | |
| 2322 | 133512 | 15, 17 (Normal Colon Tissue vs. Colon Metastasis) | 0 | 7 | | 6.52 |
| | | 18, 19 (Normal Colon Tissue vs. Colon Tumor) | 0 | 8 | | 7 |
| 2323 | 2974 | 01, 02 (Colon, High Met vs. Colon, Low Met) | 22 | 7 | 2.9 | |
| 2324 | 500 | 03, 04 (Breast, High Met vs. Breast, Non-Met) | 89 | 22 | 3.95 | |
| | | 01, 02 (Colon, High Met vs. Colon, Low Met) | 34 | 114 | | 3.64 |
| 2325 | 376919 | 16, 17 (Colon Tumor Tissue vs. Colon Metastasis) | 24 | 61 | | 2.5 |
| | | 21, 22 (Normal Prostate vs. Prostate Cancer) | 4 | 13 | | 3.3 |
| | | 15, 17 (Normal Colon Tissue vs. Colon Metastasis) | 21 | 61 | | 2.71 |
| 2326 | 8403 | 03, 04 (Breast, High Met vs. Breast, Non-Met) | 6 | 0 | 5.85 | |
| 2327 | 3643 | 01, 02 (Colon, High Met vs. Colon, Low Met) | 6 | 19 | | 3.43 |
| 2328 | 447211 | 15, 16 (Normal Colon vs. Colon Tumor Tissue) | 46 | 0 | 48.62 | |
| | | 15, 17 (Normal Colon Tissue vs. Colon Metastasis) | 46 | 0 | 49.38 | |
| | | 18, 19 (Normal Colon Tissue vs. Colon Tumor) | 9 | 0 | 10.29 | |
| | | 18, 20 (Normal Colon Tissue vs. Colon Metastasis) | 9 | 0 | 7.69 | |
| 2329 | 447211 | 15, 17 (Normal Colon Tissue vs. Colon Metastasis) | 46 | 0 | 49.38 | |
| | | 18, 19 (Normal Colon Tissue vs. Colon Tumor) | 9 | 0 | 10.29 | |
| | | 18, 20 (Normal Colon Tissue vs. Colon Metastasis) | 9 | 0 | 7.69 | |
| | | 15, 16 (Normal Colon vs. Colon Tumor Tissue) | 46 | 0 | 48.62 | |
| 2330 | 14929 | 08, 09 (Lung, High Met vs. Lung, Low Met) | 23 | 16 | 2.01 | |
| | | 15, 16 (Normal Colon vs. Colon Tumor Tissue) | 2 | 13 | | 6.15 |
| 2331 | 648934 | 15, 16 (Normal Colon vs. Colon Tumor Tissue) | 8 | 0 | 8.46 | |
| | | 15, 17 (Normal Colon Tissue vs. Colon Metastasis) | 8 | 0 | 8.59 | |
| 2332 | 731785 | 15, 16 (Normal Colon vs. Colon Tumor Tissue) | 0 | 6 | | 5.68 |
| | | 16, 17 (Colon Tumor Tissue vs. Colon Metastasis) | 6 | 0 | 6.09 | |
| 2333 | 639908 | 15, 16 (Normal Colon vs. Colon Tumor Tissue) | 13 | 4 | 3.44 | |
| | | 15, 17 (Normal Colon Tissue vs. Colon Metastasis) | 13 | 0 | 13.95 | |
| 2334 | 344577 | 16, 17 (Colon Tumor Tissue vs. Colon Metastasis) | 28 | 2 | 14.22 | |
| | | 15, 17 (Normal Colon Tissue vs. Colon Metastasis) | 38 | 2 | 20.39 | |
| 2335 | 2906 | 01, 02 (Colon, High Met vs. Colon, Low Met) | 10 | 25 | | 2.71 |
| | | 15, 17 (Normal Colon Tissue vs. Colon Metastasis) | 0 | 7 | | 6.52 |
| | | 03, 04 (Breast, High Met vs. Breast, Non-Met) | 2 | 15 | | 7.69 |
| 2336 | 446938 | 15, 16 (Normal Colon vs. Colon Tumor Tissue) | 8 | 1 | 8.46 | |
| 2337 | 2493 | 03, 04 (Breast, High Met vs. Breast, Non-Met) | 33 | 9 | 3.58 | |
| 2338 | 38 | 15, 16 (Normal Colon vs. Colon Tumor Tissue) | 40 | 118 | | 2.79 |
| | | 15, 17 (Normal Colon Tissue vs. Colon Metastasis) | 40 | 259 | | 6.03 |
| | | 16, 17 (Colon Tumor Tissue vs. Colon Metastasis) | 118 | 259 | | 2.16 |
| | | 19, 20 (Colon Tumor Tissue vs. Colon Metastasis) | 88 | 6 | 10.97 | |
| | | 18, 19 (Normal Colon Tissue vs. Colon Tumor) | 3 | 88 | | 25.67 |
| 2339 | 13818 | 03, 04 (Breast, High Met vs. Breast, Non-Met) | 6 | 0 | 5.85 | |
| 2340 | 8371 | 01, 02 (Colon, High Met vs. Colon, Low Met) | 0 | 6 | | 6.5 |
| 2341 | 402494 | 15, 16 (Normal Colon vs. Colon Tumor Tissue) | 3 | 13 | | 4.1 |
| | | 16, 17 (Colon Tumor Tissue vs. Colon Metastasis) | 13 | 3 | 4.4 | |
| 2342 | 731785 | 16, 17 (Colon Tumor Tissue vs. Colon Metastasis) | 6 | 0 | 6.09 | |
| | | 15, 16 (Normal Colon vs. Colon Tumor Tissue) | 0 | 6 | | 5.68 |
| 2343 | 4621 | 03, 04 (Breast, High Met vs. Breast, Non-Met) | 11 | 1 | 10.73 | |
| 2344 | 9750 | 01, 02 (Colon, High Met vs. Colon, Low Met) | 0 | 6 | | 6.5 |
| 2345 | 133512 | 18, 19 (Normal Colon Tissue vs. Colon Tumor) | 0 | 8 | | 7 |
| | | 15, 17 (Normal Colon Tissue vs. Colon Metastasis) | 0 | 7 | | 6.52 |
| 2346 | 162626 | 03, 04 (Breast, High Met vs. Breast, Non-Met) | 1 | 12 | | 12.3 |
| 2347 | 730059 | 15, 16 (Normal Colon vs. Colon Tumor Tissue) | 0 | 6 | | 5.68 |
| | | 16, 17 (Colon Tumor Tissue vs. Colon Metastasis) | 6 | 0 | 6.09 | |
| 2348 | 2069 | 01, 02 (Colon, High Met vs. Colon, Low Met) | 26 | 8 | 3 | |
| | | 08, 09 (Lung, High Met vs. Lung, Low Met) | 21 | 6 | 4.89 | |
| | | 03, 04 (Breast, High Met vs. Breast, Non-Met) | 1 | 47 | | 48.17 |
| 2349 | 5868 | 03, 04 (Breast, High Met vs. Breast, Non-Met) | 10 | 2 | 4.88 | |
| 2350 | 2683 | 01, 02 (Colon, High Met vs. Colon, Low Met) | 3 | 22 | | 7.95 |
| | | 03, 04 (Breast, High Met vs. Breast, Non-Met) | 13 | 2 | 6.34 | |
| 2351 | 380409 | 16, 17 (Colon Tumor Tissue vs. Colon Metastasis) | 10 | 2 | 5.08 | |
| | | 15, 16 (Normal Colon vs. Colon Tumor Tissue) | 0 | 10 | | 9.46 |
| 2352 | 639991 | 15, 17 (Normal Colon Tissue vs. Colon Metastasis) | 6 | 0 | 6.44 | |
| 2353 | 535 | 03, 04 (Breast, High Met vs. Breast, Non-Met) | 87 | 13 | 6.53 | |
| 2354 | 14929 | 15, 16 (Normal Colon vs. Colon Tumor Tissue) | 2 | 13 | | 6.15 |
| | | 08, 09 (Lung, High Met vs. Lung, Low Met) | 23 | 16 | 2.01 | |
| 2355 | 134702 | 03, 04 (Breast, High Met vs. Breast, Non-Met) | 0 | 7 | | 7.17 |
| 2356 | 642477 | 15, 16 (Normal Colon vs. Colon Tumor Tissue) | 7 | 0 | 7.4 | |
| | | 15, 17 (Normal Colon Tissue vs. Colon Metastasis) | 7 | 0 | 7.51 | |
| 2357 | 14929 | 08, 09 (Lung, High Met vs. Lung, Low Met) | 23 | 16 | 2.01 | |
| | | 15, 16 (Normal Colon vs. Colon Tumor Tissue) | 2 | 13 | | 6.15 |
| 2358 | 134702 | 03, 04 (Breast, High Met vs. Breast, Non-Met) | 0 | 7 | | 7.17 |
| 2359 | 185649 | 03, 04 (Breast, High Met vs. Breast, Non-Met) | 0 | 7 | | 7.17 |
| 2360 | 10702 | 03, 04 (Breast, High Met vs. Breast, Non-Met) | 0 | 15 | | 15.37 |
| 2361 | 643955 | 15, 17 (Normal Colon Tissue vs. Colon Metastasis) | 12 | 0 | 12.88 | |
| | | 15, 16 (Normal Colon vs. Colon Tumor Tissue) | 12 | 0 | 12.68 | |
| 2362 | 643955 | 15, 17 (Normal Colon Tissue vs. Colon Metastasis) | 12 | 0 | 12.88 | |
| | | 15, 16 (Normal Colon vs. Colon Tumor Tissue) | 12 | 0 | 12.68 | |
| 2363 | 4455 | 03, 04 (Breast, High Met vs. Breast, Non-Met) | 13 | 1 | 12.68 | |
| 2364 | 185567 | 03, 04 (Breast, High Met vs. Breast, Non-Met) | 0 | 9 | | 9.22 |
| 2365 | 9115 | 01, 02 (Colon, High Met vs. Colon, Low Met) | 0 | 7 | | 7.59 |
| 2366 | 14929 | 08, 09 (Lung, High Met vs. Lung, Low Met) | 23 | 16 | 2.01 | |
| | | 15, 16 (Normal Colon vs. Colon Tumor Tissue) | 2 | 13 | | 6.15 |
| 2367 | 14929 | 08, 09 (Lung, High Met vs. Lung, Low Met) | 23 | 16 | 2.01 | |
| | | 15, 16 (Normal Colon vs. Colon Tumor Tissue) | 2 | 13 | | 6.15 |
| 2368 | 4181 | 03, 04 (Breast, High Met vs. Breast, Non-Met) | 15 | 3 | 4.88 | |
| 2369 | 5206 | 03, 04 (Breast, High Met vs. Breast, Non-Met) | 7 | 0 | 6.83 | |
| 2370 | 825 | 03, 04 (Breast, High Met vs. Breast, Non-Met) | 70 | 25 | 2.73 | |
| | | 08, 09 (Lung, High Met vs. Lung, Low Met) | 13 | 3 | 6.06 | |
| 2371 | 825 | 08, 09 (Lung, High Met vs. Lung, Low Met) | 13 | 3 | 6.06 | |
| | | 03, 04 (Breast, High Met vs. Breast, Non-Met) | 70 | 25 | 2.73 | |
| 2372 | 825 | 03, 04 (Breast, High Met vs. Breast, Non-Met) | 70 | 25 | 2.73 | |
| | | 08, 09 (Lung, High Met vs. Lung, Low Met) | 13 | 3 | 6.06 | |
| 2373 | 2748 | 01, 02 (Colon, High Met vs. Colon, Low Met) | 2 | 26 | | 14.09 |
| | | 03, 04 (Breast, High Met vs. Breast, Non-Met) | 15 | 4 | 3.66 | |
| 2374 | 2748 | 03, 04 (Breast, High Met vs. Breast, Non-Met) | 15 | 4 | 3.66 | |
| | | 01, 02 (Colon, High Met vs. Colon, Low Met) | 2 | 26 | | 14.09 |
| 2375 | 2748 | 01, 02 (Colon, High Met vs. Colon, Low Met) | 2 | 26 | | 14.09 |
| | | 03, 04 (Breast, High Met vs. Breast, Non-Met) | 15 | 4 | 3.66 | |
| 2376 | 133512 | 18, 19 (Normal Colon Tissue vs. Colon Tumor) | 0 | 8 | | 7 |
| | | 15, 17 (Normal Colon Tissue vs. Colon Metastasis) | 0 | 7 | | 6.52 |
| 2377 | 2748 | 03, 04 (Breast, High Met vs. Breast, Non-Met) | 15 | 4 | 3.66 | |
| | | 01, 02 (Colon, High Met vs. Colon, Low Met) | 2 | 26 | | 14.09 |
| 2378 | 642477 | 15, 16 (Normal Colon vs. Colon Tumor Tissue) | 7 | 0 | 7.4 | |
| | | 15, 17 (Normal Colon Tissue vs. Colon Metastasis) | 7 | 0 | 7.51 | |
| 2379 | 642477 | 15, 16 (Normal Colon vs. Colon Tumor Tissue) | 7 | 0 | 7.4 | |
| | | 15, 17 (Normal Colon Tissue vs. Colon Metastasis) | 7 | 0 | 7.51 | |
| 2380 | 2493 | 03, 04 (Breast, High Met vs. Breast, Non-Met) | 33 | 9 | 3.58 | |
| 2381 | 5796 | 08, 09 (Lung, High Met vs. Lung, Low Met) | 5 | 0 | 6.99 | |
| | | 03, 04 (Breast, High Met vs. Breast, Non-Met) | 14 | 3 | 4.55 | |
| 2382 | 3782 | 03, 04 (Breast, High Met vs. Breast, Non-Met) | 21 | 0 | 20.49 | |
| 2383 | 884 | 03, 04 (Breast, High Met vs. Breast, Non-Met) | 51 | 20 | 2.49 | |
| | | 15, 17 (Normal Colon Tissue vs. Colon Metastasis) | 1 | 10 | | 9.32 |
| | | 21, 22 (Normal Prostate vs. Prostate Cancer) | 20 | 7 | 2.81 | |
| | | 08, 09 (Lung, High Met vs. Lung, Low Met) | 10 | 63 | | 4.51 |
| 2384 | 5860 | 03, 04 (Breast, High Met vs. Breast, Non-Met) | 10 | 2 | 4.88 | |
| 2385 | 5275 | 01, 02 (Colon, High Met vs. Colon, Low Met) | 11 | 2 | 5.07 | |
| 2386 | 3932 | 03, 04 (Breast, High Met vs. Breast, Non-Met) | 13 | 1 | 12.68 | |
| 2387 | 884 | 08, 09 (Lung, High Met vs. Lung, Low Met) | 10 | 63 | | 4.51 |
| | | 15, 17 (Normal Colon Tissue vs. Colon Metastasis) | 1 | 10 | | 9.32 |
| | | 03, 04 (Breast, High Met vs. Breast, Non-Met) | 51 | 20 | 2.49 | |
| | | 21, 22 (Normal Prostate vs. Prostate Cancer) | 20 | 7 | 2.81 | |
| 2388 | 4455 | 03, 04 (Breast, High Met vs. Breast, Non-Met) | 13 | 1 | 12.68 | |
| 2389 | 5860 | 03, 04 (Breast, High Met vs. Breast, Non-Met) | 10 | 2 | 4.88 | |
| 2390 | 5860 | 03, 04 (Breast, High Met vs. Breast, Non-Met) | 10 | 2 | 4.88 | |
| 2391 | 372791 | 15, 17 (Normal Colon Tissue vs. Colon Metastasis) | 12 | 0 | 12.88 | |
| 2392 | 5206 | 03, 04 (Breast, High Met vs. Breast, Non-Met) | 7 | 0 | 6.83 | |
| 2393 | 372791 | 15, 17 (Normal Colon Tissue vs. Colon Metastasis) | 12 | 0 | 12.88 | |
| 2394 | 2846 | 01, 02 (Colon, High Met vs. Colon, Low Met) | 8 | 19 | | 2.57 |
| 2395 | 5275 | 01, 02 (Colon, High Met vs. Colon, Low Met) | 11 | 2 | 5.07 | |
| 2396 | 2846 | 01, 02 (Colon, High Met vs. Colon, Low Met) | 8 | 19 | | 2.57 |

The application's sequence listing, which the Patent Office published only in electronic form, follows.

SEQUENCE LISTING (2396 sequences)

SEQ ID NO: 1 - DNA, 362 bp, Homo sapiens
  misc_feature (1)...(362): n = A,T,C or G
atggggacggaggaggaaagaaagacagccactgggttccccgtgttcacacacttggtctctttctctctttctgctgactggtctgagggttagcatttgtatccgcaaaatggcttttgagtcctcacagacagtggctttgagaaacctgctcttggtgtccccacatgacctcattggtcaaccttagtgctgctaacagcaagacaagcagatactgtgtgcattccgacatgaggcagtacaaagtacatagtatcacctaggaactagtcttgccaaaagcagaggggggcagggggagacagagagacacanagagagaaacagagaccgtgacagtgagaaatttaacctan

SEQ ID NO: 2 - DNA, 273 bp, Homo sapiens
agtaatatgacacatttcaattaaaatagtcacatgtcttcccattactcatctctcctaagccaatgtaaaagcttggtttatattgttagatacaataataataaataggtctttttagtaaatttatgcttaactatccagcaacatggtaatggttatgtggcccttaggtttttacagattgattttgttgttaagtttcattttctcttttttaagtgctttttttggataactgttaatagctacttagttgggtattaaagaaag

SEQ ID NO: 3 - DNA, 380 bp, Homo sapiens
tacggttgcgagatgacgacagacgggcctggctgatcacctgcggccgcttgattgagaccagcctgacccttattttgaaacccgggctatactattgctacatatttaactgttcttggtggcacatgcctgtaataccatctactatgcagtgggaggctggataatcacttgaacctgggaggcgaaggttgtggtgagccgagatcgcaccattgcactccagcctgggcaacaagagcgaaactacgtctcataaaaaaaaaaaaaaaaacaatgggggcccgttttttgggtattcccaccatgaaaaaaatcattgcaggggtgggccaaccccactctaaggtggcgggtaaaaaaacttttttttggtc

SEQ ID NO: 4 - DNA, 344 bp, Homo sapiens
aaacactacatcactgcctactccaagccctagctccagtacgggaagtgaaccatgacaggaaatttaacatctacaggaaaagtagaaacacaattcttctaaggttttatataactccaactaaggtcatctcttccttgccattaacttcctgaacgcctgtaatcccagcactttgggaggccgaggcgggcggatcacgaggtcaggagatcgagaccatcccggctaaaacggtgaaaccctgtctctactaaaaatacaaaaaactagccgggcgtagtggcgggcgcctgtagtcccagctacttgggaggctgaggcaggagaatggcgtgaat

SEQ ID NO: 5 - DNA, 317 bp, Homo sapiens
tacgacagaacggcaccatgttggccacgctggtcttgaaagcctgaactcaggtgatttgcccgcctcggcctcccaaaacgctgggattaccgccgtgagccaccatgcctggccttgtccattttagagccagcaagccaatcacatttcaaggcctctggtccccttttgtgaaataaatctctatacagggcacggtttccaccctctctccagctcctagcagttccatagcacgcttctaacctgctgtaacagagtgaggatttccatgtccttatgcagtggatgaatgatagggtgagtgagaacct

SEQ ID NO: 6 - DNA, 345 bp, Homo sapiens
agtgctggagaatcatgtagttaatcccattgctcttacaagtgtcagcttacttgtatcagcctccctacgcaaggacctatgcactggagccgtaggaggctcttcagttgggccccaaggataaggctactgatttgatactaaatgaatcagcagtggatgtagggatagctgattttaaaacactcggctgggcacagtggctcacacctgtaatcccagcactttgggaggctgaggcaggcagatcatgatgtcaggagtttgagaccagcctggccaatatggtgaaaccctgtctctacaaaaaatacaaaaattagctgggcatgtggggcgtgt

SEQ ID NO: 7 - DNA, 359 bp, Homo sapiens
cactgcaacctccgcctcccaggttcatgccattctcctgcctcagcctcccgagcagctgggattcccggcacccaccaccatgcccagcgacttttttgtatttttagtagagacagggtttcactgtgttagccaggatgttcttgatctcctgacctcgtgatccacccgcctcagcctcccaaagtgttgggattacaggcgtgagccaccgcgcccggccgagcagataggttatcaaagagctgagcaaagattgtagcagtctcacagtactagggagataaaggtaggaattcaggactttccagggtgcacaggctttggtaaatgcctcacattatcagctgaaaacc

SEQ ID NO: 8 - DNA, 398 bp, Homo sapiens
  misc_feature (1)...(398): n = A,T,C or G
tgagtctcaaactcctgggctcaagtgattctcccacctcagcctcccaagtagctgggactagaggcatgtaccaccacgcctgcctaatttttttgtatttttagtagagatggggnttnaccatattggccaggctgatcttgaactcctgtcctcgggtgaactatctggcatggtctagttatgtgacgtgcacacatacttctttttgtatgaattcttcagcagaaatgggggtacttgggctgtgcgccccccgctcctctttataatgtcttgtatttagaaggaaggggctgcgttggcctcttcgaaatgtcgcgggtataaattcgctgaggagtgcttgtgaccacccttctaacgattcttctacgtgtgtagctctccagctc

SEQ ID NO: 9 - DNA, 382 bp, Homo sapiens
agaggaggagaatcgggagcacaagaaggaggaggagatgaagaggtgaaggagaggaggaggaaaggagaagagaaggaggaggagaaaagaaaggagtggagaaagaggagaggaggagaaaaaataggaaacgaagaggagaagaataggaggaggaaaaggatgggagaaaagaaaaaggaaaagtaggaggagtagaaaaagaggagaaggaggaagaagaaagagaaggaggagacgaaaagaatgagaaaaagaggagaggagaatgaggagaaggcgtataagataagaacgaggagaggattaagaaggagaagtagaggaggaggagagaagaggaaaggaggaggaaaggagaatacaaggaggaagagaa

SEQ ID NO: 10 - DNA, 326 bp, Homo sapiens
ccaaccagatgttgactgtcatcactgggactcaactgggaaaccctctttttcctccaaatttgctgctctaggtgctaagggtctgtaggacagagctttgggactgttagaattctatcagaaaaaaacgagacagaaggctataagcatgagtgtgggcagggtgctgtggttcacttctgtaatcccagcactttgggaggccaaggtaggagaatcccttgaagccaggaattcaagaccaccctgggcaatatagcaaaaccatgattctacaaaaaattaaaaagttatctgagtgtggtggcacacacctgtagtcc

SEQ ID NO: 11 - DNA, 286 bp, Homo sapiens
  misc_feature (1)...(286): n = A,T,C or G
gaagaaggtggggaggaagaggaggaggaagaagaaggtgatggtgaggaagatgatggacatgactatgcggaatctggatcagctatgtgtaatcgggctgctgaatattattaggatgacgagtgtgatacctacaagcttatnacttgggaggcttgctcttgtagtatcgcttgtatcttttggaggttgtagactatatgttctctgttttccttttttctctttctttttttaatgaaaaaaaaggacctctcggtttattttgtgtggttatttatcg

SEQ ID NO: 12 - DNA, 325 bp, Homo sapiens
gcggtctgggctcactgcaagctgcacctgctgatgtcaagcaactctacagcctcatgctcccaagtagctgggattacagcagcgcaccattatacctggctaattgttgaataattagaacgggaggagatttgctataggaaagtcctaaaataaaggaaaagtgatgagccctaataaacaagtagtgtttttgactcagcattgaaaaaaatgaatgagctatgaccaggagatctaagtttcttttggtggctaacatgcacaaaagttatctgttcaataagggtagtattgatggtccatatctcatattaactag

SEQ ID NO: 13 - DNA, 320 bp, Homo sapiens
agcctcctgagtagctgggactataggcgcccgccaccacacccggctaatttttttgtatttttagtagagacggcgtttcaccgtgttagccaggatggccttgatctcctgacctcgtgattcggctgccttggcctcccaaagtgctgtgattaccagcgtgagccgccgtgcccggccactagcggcatttaattaaagagatcttggcgccgtctctcgtatactattgcctctaaccttgcgcgtgaccctgcctgatccttagtctgcttattggaataacggggatgtccttgctttcacaaggtttgatc

SEQ ID NO: 14 - DNA, 353 bp, Homo sapiens
cgggcctggcggatcacctgcggcagttagtttgagaccagcctgaccctttttttgaaacccgggctatactatagatacaaaagtagctggtcgtggcggcacatgcctgtattaccatctactatggagggagaggctggataatcacttgaacctggtaggcgaaggttgtggtgagccgagatcgcaccattgcactccagcctgggcaacaagagcgaaactacgtctcacaaaaaaaaaaaaaaaaatctttggggccggtttttaaatgaactcgacatggaagcacacacttgtaggcttgggcacaccccaaagcttgagcggcgggaaaaaattgttttttg

SEQ ID NO: 15 - DNA, 349 bp, Homo sapiens
gaatccagatggcaagaattgtctttgctacccctacatctacggtttactttgatgagcaattggcttcattatttgggccaccacttttatatacatactgggtttgagggcagcaaccagcattcttggctaagataaatgaggctgggcacagtagcttatgcctgtaatcccaggactttgggaggcctaggtgggaggatcacttgagcttaggagttctagactagcctaggcaacatagcaagaccctaactctaaaacaattttttttttttttttttggagaagagtttcacttttttggcccaagctgagagggacgctgccacccggaggattcctg

SEQ ID NO: 16 - DNA, 405 bp, Homo sapiens
  misc_feature (1)...(405): n = A,T,C or G
cgttgctgtcggtcaaaactgtctttaaaaatcctacccatccctttaagttcagttgaaaattacctcttatataaagcttctgctaatccctccatttcccagccccagaggggactgttttttccaaaggggacttttttctgaacccccataatgttttatgcttcttatatggagtttatataattttgcattgtattggaatcatttaggtaattgtcttatcttcattgctagagtgtaagctctttaaggtaaagacagtgttattcagttaattatctccccaaatacctantatagcatcttaggcctatctagtagatactcaaaaaatatatatcctaataaatgtgattaagctatcacatttagtgcctatggtaggcactaaatcaaggt

SEQ ID NO: 17 - DNA, 307 bp, Homo sapiens
gcagtggcatgatctcagctcactgcaacctccgcctcccaggttcatgccattctcctgcctcagccttccgagtagctgggactacaggctcccgacaccatgcccagctaattctctggattgatagtatagacgggtttttattgtttttttccacatttttctttttagtattgcctatatttcctcggcatcttgtacctaatagtgtgcgtttaaaaaattgcctggcaacatatatacgcttttttatttttatgacttgaataaaaaaaggtgggactcccaatttgttctcgcacct

SEQ ID NO: 18 - DNA, 138 bp, Homo sapiens
acagttttaaacaacaggaagtcttcattcccttcctgggtgtctttggtcatctgggccctgatggtggagccatgccagatagagggattatgatgcttaaatctagtaggattactggtggagccgcttgaatcg

SEQ ID NO: 19 - DNA, 324 bp, Homo sapiens
atgtgtatacatcctggtaaattttatggatgtgaaataacactgttgagtttgttcagtcagtatttctacattttaaatgaaaaaaaatgctgatcctattcattggagaaaacaacccacgaaacaaccccccaatatggtagaataaatgcctatttctaaggtgctatagtcttccaatgcacaccttcaggttcagacttagacaagaccaaaatatactttagttctaatcaccctcctaaagacaccacggcagagtgcactcccaacctctaccatacatagcggaaaggcacacactactactgtgagctgaaa

SEQ ID NO: 20 - DNA, 280 bp, Homo sapiens
  misc_feature (1)...(280): n = A,T,C or G
atgtgtatacatcctggtaaattttatggatgtgaaataacactgttgagtttgatcagccaatatttctacattttaaatgaaaaaaaatgctgatcctattcattggagaaaacaacccacgaaacaaccccccaatatggtataataaatgcctatttctaaggtgctataaggcttccaatgcacacccttcaggttcagacttagacaagaccanaatatactttagttctaatcaccctcctaaagacaccacggcagagtgcactcccaacct

SEQ ID NO: 21 - DNA, 317 bp, Homo sapiens
agagaatcactctaaagcagtggttctcaacctggctgcacattaaaatcacctgggatgttttaagtctcagctcccaggcttcaccccaggttattatatgaaaatctggggttgaaactcaggcatcagtgtatttcaaagctcaccatgtgattccaaggtatgtgcatatttgagagcctttgccttaaaagaaggagcaggtgactcatactagcaagatagtgaacagatcaccaggccagccttgtgggtagaaataatcgtgacactctgacactgttctctactaagttaatcaacatgtttacccc

SEQ ID NO: 22 - DNA, 231 bp, Homo sapiens
  misc_feature (1)...(231): n = A,T,C or G
agggagctggccactctaccactctggtctcattcttcatatctgcagaatgcgggtgaaaatggcaccccctcacaggtgtgtgctgggattactgagataatgtgtaaaacttagctgagggccctggccctacaaaggggtcagttggtattagtcaatttcaaaggcctacattntccttgtctataaaattaggggctcagacagatgattttgaggtttctcttg

SEQ ID NO: 23 - DNA, 384 bp, Homo sapiens
cgttgctgtcgaaactgccacggccactaggagtctaaggacacatccaatttccattcgcatccaaaatggaatccgagacagaaagaggaccttagccttcatatctgtttttttcttatgaagcttcttctggttggaaacttgtcaaatttcatcaggtaagaagtgctaaagtgaacctgtaaactttgtttcaaaaaacaaaaaccgaagtttaagaaatctaaagatggtgtcagccttagacagatctctggactgtaatctgggaaaggtcaaataagatctccaatcgtgtacaattccaaatacatttgagagcagtgggtctgaaaatgtggttcccagaccagcagcatcaacaccatgaaggaagttgtt

SEQ ID NO: 24 - DNA, 350 bp, Homo sapiens
gtagatgggagtacaggcacacaccaccacgcctgactaatttttgtagagacagggttttgccatgttgtccaggctgatcttgaactcctgatctcaggtgatctgcccgcctcggcttccgaaagtgctgggattacaggcatgagccaccatgcccggccgatgtctgcattttcataggtgaccactgaggctaaaaagcatcactattccaaatcactattccaaaggcattaactcctgatggtgacatctcaggcacttagacacttgtaatttattcatcaaacatgcctgagacagataacattttgctaggtgctcagtctgcaacgatgtattggact

SEQ ID NO: 25 - DNA, 149 bp, Homo sapiens
tggttcgcgttgtgaaaatacgatatacgtgtacctgcttctgatatagtctacccactcggtgctgcctgtgtttaactctgctcctatcgatacacgcttcatctccataccttttactattgtctctcccttgcacttattcgctg

SEQ ID NO: 26 - DNA, 379 bp, Homo sapiens
ttaacacagcgaaaccccgtctctactaagaatacaaaaaattatccaggtgtggtggtgggcgcctgtagtcccagctacttgggaggctgaggcaggagaatggcgtgaacctgggaggcggagcttgcagtgagccgagattgcgccactgcactccagcctgggtgacagagcaagagtccgtctcaaaacgaagcagcgcataaaagaaggacgaaaccaccgccaaccaaccaaacaaaacccaaaaaacccaaagtaacggaggtggccgagggagctggggataggggaggagtccaaacacctgggagctagaagtttctgaaaactgtaagtcttttggtgtcactaaaagatacaggatgaatgatcg

SEQ ID NO: 27 - DNA, 388 bp, Homo sapiens
cgttgctgtcggattcacctcctctcaccaaatatttaactacctgctgaatacgcctctgtactaggcacataatggaactaaaaaatgctcatgtccagtttttgtgttgagtgaacaatgctgcagaccctaataagattgggtacagatcggcatgcgcctgtagtcccagctactcaggagaattgcttgaacctaggaggtggaggttgcagtgagccgagatcgtgccactgcactccagtctgggcaacagagcgagactccatctcagaaaaaaagaaaaaaagactgggtacagatgtgatattggaagaaaaagatcaagctgatgaggttaggatacccaggccctttggacttaaagatcactagtgtctaaatt

SEQ ID NO: 28 - DNA, 237 bp, Homo sapiens
gattgccccactgcactccagcctgggtgatagagcaagagcctgtctcaaaaaaaaaaaaaaaaaaaaaaatttggggggggtttttttgggtattcccaacgtggaaaaaacctttggggggttgggccaaccccccttttaatgggcgggaaaaaaagggtttttttggaaaattgggggaggtttgggtttttttggaccccttttaaggggggaaaaaccagttcaccaccg

SEQ ID NO: 29 - DNA, 211 bp, Homo sapiens
  misc_feature (1)...(211): n = A,T,C or G
agatcgtgccactgcactccagcctgggcgacagagcaagactctgtctaanaaaaaaaaaaaaaaaaaaaaaaaaaggggggcctttttttccgaaatcccacactggaaaaaatctttggggggtttggaccaccccccccttaaagggcggggaaaaaagggtttttttgggaaaattggggagctttttgttttattgcacccctta

SEQ ID NO: 30 - DNA, 282 bp, Homo sapiens
tagcaagacactgtctctacaggggaaaaaaaaaaaaaaaacctggcccttaaggagataaattattttagccggtaaacccgggaggcaaaaccctcccaattccggggcatgggctttaatggaagggggccaaaaaaacctgttttaattcccaccctttgtttagggggccctttttttgtttttgccctgattaaagtttaaccccaacggccaaatcctcttatacctagacatttaatttcataaagggggggggggggtagccaaagggaaaaa

SEQ ID NO: 31 - DNA, 363 bp, Homo sapiens
  misc_feature (1)...(363): n = A,T,C or G
ggagcggaggcgtcgggaaaacgcgccagggaaatgagccangggcaagaatcgaggcgcttctcggccgtcgaaggcagcttaggactgctgagagactgggtaaggcagcgtccttaccttggaatgccgcagaaccgggcttcattagagcactggtgcatactcttaaaaattatctcggtaccggttcgtattttatttagtggatttaatcgtctgggaaggaggttctagccgcagccaatcttacagacgcgcagaatattaatctattttgtgccgacttaaggcacgcatattttaggatttgtgggttcccaagacctatcccaacgaactcaagagaagggggaaggccag

SEQ ID NO: 32 - DNA, 331 bp, Homo sapiens
ccatcctggtcaacatggtgaaactctatctctacaaagaagacaaaaatcagccaggcttggtggtgagtgcctggagtcccagttactcaagagactgaggtggaaagattgcttgagcccagatgttgaagttgcagtgagccaagatggtgccactgcactccagcctggttgacagagtgagaccctgtctcaaaaaaacaaaccaaaagaaaagagagagagagagagaagttaagaacctgaatattctaagaaagaggttctgagagtagaaattcagctgaacccatattttcacaggaagtgagccaagaaggggaaaaaa

SEQ ID NO: 33 - DNA, 377 bp, Homo sapiens
ggcacgagggaaaacaggccctgggcccgctgatgtgcataattccacgtttgccccccatgtaaccaggatggtaaattacaggtgtcagataatcacgctctggagtggctacttgaggatgcgatcgaccaatttaagctccgtctgacacatgatcaatagcccgtgatgctgcatggaattgcaggcacagcgtccaaacctgcagagcagtggctcccagctgtggcaactttgccccccagaggacatttggcaatgtctggatatgtttgcaattgtcacaactaggagagggggatgctattggcatctggcgagtgaggccaaggatgctgctaaacctcccatgatgcacaggagaagtccccacc

SEQ ID NO: 34 - DNA, 358 bp, Homo sapiens
ggaaaataactcggattgcaggaagaatccaggtccctgtggctacaggactgaggccctgtttccttcctggcaggggaccactcttagcccctagagtccttgcatctaggggccagcaaatccttctcactcttgggacctctctaacatcctccttcaccacatagctctcatttcttgccagagaatgctctctgcttttcaggactcagataatttagccttcccaggtaatccaggataatcaatctactttgagatccataccctttaatcacatctgcaaagacccttttgccatgtaacatgacatgatcacaggtgttagggattagagtgtggctatctggggaaa

SEQ ID NO: 35 - DNA, 275 bp, Homo sapiens
gtccattctcctcccttccccaataacagaaccccagttttgctgcagaaggcaatgtgcccagctaaagggcaacatttccagcctccctggcatatatggtatgactgtgtggctgaattctaggatattagatataaacagaaggtgctggaaggtatctccaagaatgccccttgaatagaagcagtattgatgaaggccatttttgtcctctctgcttcagcctgcattcagccttggatgcatatgtgatagctggaacgccagcagcc

SEQ ID NO: 36 - DNA, 362 bp, Homo sapiens
atgccagtagtatttttgtttttttcactgagtctattgtgtctagaaaagtgcttatcacattgtagattctcaatgaactacttattgaatgaacagtcctatgaaccaggtatctcccttggccagattttacctaatgaagattctgcagcagtgagaacttgcctagagtcacatcgtcaaaggtggagctagaatctgtaagcaacctggctctctactctttaccactgctgcatggtactgcatggtgcctctcatttatgtggtgaaatttcaaagtactattttttatggttcccttactagacaggtccctcgcagcaggggatactaactttatctctggtccctgactg

SEQ ID NO: 37 - DNA, 410 bp, Homo sapiens
  misc_feature (1)...(410): n = A,T,C or G
ggcacgagccacacctggccttctccatgctcggaataacttcctgcagcgaccaacaggctaaagagggggaaggtctggaggttggaaagaggactggaatctgattggggttccaacaaatctgtaacaccgctgggaacgactgggtcccctttaggtcctttaggacagcgtttgaaatcttgctttcccctgcagggatccagcaccggctcctcctccggcaaccacggtgggagcggcggaggaaatggacataaacccgggtgtgaaaagccagggaatgaagcccgcgggagcggngaatctgggattcagggcttcagaggacagggagtttccagcaacatgagggaaataagcaaagagggcaatcgcctccttggaggctctggagacaattatcg

SEQ ID NO: 38 - DNA, 325 bp, Homo sapiens
  misc_feature (1)...(325): n = A,T,C or G
ggaatgtggacacacatatcagaactttcatgcttactttctcaggatgcttgtgatctcaaagttaggacaggagtgaatttcaaaggccaaatggaaaattagcaacaatcccatcttaagggcttataaagagtatcagaatcattcttggggttgggccggncatgatggctcatgcctgtaatcctggcacttcggaaggccaaggagggtgggtcacctgatggcaggagtttgagaccagtctgggcaacatggttataccctgtgtctacttgccaaccctaaatttacttagcgataaagggggggtcccttttag

SEQ ID NO: 39 - DNA, 398 bp, Homo sapiens
cgttgctgtcggaaccaatggatgtcagtaggagtttctgttaaatgtctccttgatggggactcagtactgtgtagagacgctgtgtttctcttctgggggtgtgcatcagaaccactggggccttttaaaatctacagatgccggccgggcgccgtggctcacgcctggaatcccagcacttggggaggctgaggcgggcggatcacaagcgcaggaaattgagaccatccttgccaatatggtgaaaccccatctctacaaaaaatacaaaaattaccggggtgtggtggcgtgcacacctcccagctacttgggaggctgaggcaggagaatcgcttgaacccgggaggcaaagattgcagtgagccgagatcacgccactgcactccagcctg

SEQ ID NO: 40 - DNA, 339 bp, Homo sapiens
  misc_feature (1)...(339): n = A,T,C or G
agacagtgttccaccatgttggccaggctggtctggaactcctgacctcaagtgatctgcccacctcaacctcccaaagtgctgggattacaggcatgagctgtgacacccatcgtgtctaatttttgacagataaaatgatttcatgatccaacatttccttaccagtgagggattcaataaaataccaattctcagagggcctttacacttcttttttttttttttctaaagaagattgtttattacccacgagataattttgaaaagccatcattttttttctgcttgtgacccgaaaaaacgtccagtgttctcgcgatttctttcatctctttn

SEQ ID NO: 41 - DNA, 350 bp, Homo sapiens
cgctaggaaatgctgccctcacactcgagtcagctcatctgctccgggctgtgtctgctcggcaaactagacaagggcaagcgatcccacacctctcacacagaacttctagaaaagatgggcctctccaggtgcggtggctcacactggtaatcccagcatttcagggggccgaggcaggtggatcatgtgaggtcaggacttcaagaccagcctgaccaacatggtgaaatcccatctctactaaaaatacaaaaataaataaataaaataaaaataagccgggcgcagtggctcacgcctgtaatcccagcactttgggaggctgaggcaggtggatcacaaggtca

SEQ ID NO: 42 - DNA, 360 bp, Homo sapiens
ttgggaggccgaggcgggtggattatttgaggtcagtcgttcgagaccagcctggccaacatggtgaaaccccgtctctactaaaaatacaaagattagctgggtgtggtgacgtgcctgtaatcccagctactcgggaggctgaggctggagaatcgcttgaacccatgagctgagatcacaccactgcgcttcagcctgggccacagagcgagactccgtctcatcaaaaaaaattatatgacccctgtctataaatgataagagtgagagagaaagcacccagggtttcaaatgccttatgcctgctgggactaactttgcccatacattgtgctaaatactttccattaagtctcc

SEQ ID NO: 43 - DNA, 353 bp, Homo sapiens
  misc_feature (1)...(353): n = A,T,C or G
gattacaggcgtgcaccaccatgcccagctagtttttgtatttttaatagagatgaggtttcaccttgttggccaggctggtctcgactcctgacctcaggtgatccactcaccttggcctcccaaagtgctgggattacaggtgtgagccactgcgcccggcctactacatacatttctaannnnnnnannnnnnnnnnnnnnaaaaaggggggccgttttttccttaaacccaaacttgaaaaaaccctttgggggggtggccccccccccccttaaatggcggggaaaaaagggtttttttgggaaaattggggcggctatgcgttttttgggcccccttagagccggca

SEQ ID NO: 44 - DNA, 331 bp, Homo sapiens
gagaatcgcttgaacccgggaggtggaggttgcaatgagccaagatcgcactactgcactccagcctcggtgacacagctacactccgtctcccctactcgccaaaaacaaaaacaaaaaaaaagagtgcagagaactggaggtggcgggaaaagcgcttggattctcctttgacatgctcttccctggcaagatgggatcccttggaaaattttaagtggaaaagtgacacgatttatggctgagtgcagcagctcacgcccgtaattccagcactttgggaagctgaggcaggcactttgggaggctttaggtcaggagttcaagacca

SEQ ID NO: 45 - DNA, 348 bp, Homo sapiens
  misc_feature (1)...(348): n = A,T,C or G
attactgatatggggggtatggtctagtcgctgtgctgagcatttcatataactgggctttttctatcctcacagcatagcctttgagataggtatgtggaactattcccattttacagataaggatcctgaggcttagagagttcaagtgacctacccaagggcacatcactgataaagggcagaggtgggattcaaacccacatctgtcaggtgcaagtgcaaggctccttctcctcatgctcactgcctgctggggaatagggtactggggacataccccagggagcccttccccatgttctgagtcccagntcatcccatgctgctattttgctctcccaggag

SEQ ID NO: 46 - DNA, 357 bp, Homo sapiens
  misc_feature (1)...(357): n = A,T,C or G
gattacaggtgtgagccatcgcgcctggcccctgcaacttatctttctatatttctcatttttcacatgaaaaggttggtctattgtatctgattttatggaagctgtgctctgtatttgtgggttctgaaattgtgcttatgatatgactcattactgattgtttcacatcttagagatgaggttagactgaaatgtggaccggaagcctatttttgtgtttcaatttaaaaaataaagccaggcgcagtggctcacgcctgtaatcccagcactttgggaggccaaggcaggcggatcatgaggtcaggagattgagaccatcctggctaacatggtgaaaccccggctatactn

SEQ ID NO: 47 - DNA, 353 bp, Homo sapiens
tcctgcctcagcctcctgagtagctgggactgtaggcgcccaccacctcgccccgctaattttttgtatttttagtagagacagggtttcaccgtgttagccaggatggtctcgatctcctgacctcgtgatccgcccgcctccacctcccaaagtgctgggattacaggcgtgagctgccgcgcccagccataaaacttctacgaacttctagcagaagtaagggaatagtttctaattcctgagaaagtattatgatgacagatcctatattctttattcactagtatatacttagtgtacacataataagtaggtgttcaagaatttttttttttccttgagatggagcg

SEQ ID NO: 48 - DNA, 356 bp, Homo sapiens
gtagagatggggtctcgctatgtcgcccaggctggtcttgagctcctggcctcaagcgatcctcctgccttggcctcccaaagtgctgggattacaggcatgagccacaagcgccggcctctctcttcttattgggataccagtcctctgagactcgaaactgtgccccaggccttggccatactgataaatatctaggccctacaggagttcgtgtccatgaacccagtacacgcaattcctcagccttaaaatctagtcactgactcatttcaggccccagcacagacgaaaacaagccattctgtttgcccagattacattgcgggtctccaagaagtggaatgttcaccaat

SEQ ID NO: 49 - DNA, 342 bp, Homo sapiens
gaggggagctaaaagggaatggaggggagaccagcaggagctctgtctgcccgattctggtttgggctgtgagacagtcattgcatttttttgcacagttctggccacacagtatttaagaggctttgcctacagacctgagtgactgtgtgaatggtggcactggtgcatacggggacgcctgaggaggaacagatttgagacttgtccacctaggactccctgtgggattgccagtatcacccctcttcgtcattaattcccagcttgcctgggggaggccagggggtagcatggggttcgggttcccctatggttcaaacaccaacccatctgctctgg

SEQ ID NO: 50 - DNA, 305 bp, Homo sapiens
  misc_feature (1)...(305): n = A,T,C or G
gcaattgggcatagaaccttccaactgagcagcgaaggtatcaggatgcagtgtataatttaagacatcaaataaagctgacaagcaaagacaataatggagacttggggttaaattagctgactggagtcagaaacactgggatctgcatacaaagtaaacattaaacattgggatgcagtccaggcatggtggctcgaccctgtaatcccagcactttggaaggccgaggtgggtggatcatttgacgtcaggagttcaagaccagcctggccaacacggtgaaaccccatctctactaaaan

SEQ ID NO: 51 - DNA, 124 bp, Homo sapiens
gttataggccttttgcttttcttagcatatggggggaggtggaattactatcgtagtcacaaatgaccaaaacaggacttcccaatatctatttattttagcccgggtgccgcggctcttgccg

SEQ ID NO: 52 - DNA, 218 bp, Homo sapiens
  misc_feature (1)...(218): n = A,T,C or G
gcaccaatgtgaagaaccacaaacattgggtctgggagaaggcttctgaggtggcttccacagtccatgcaagggacacagagaagaacaaggctcacagcaagtaggatggcatggtaaaaaacaaaaagaagaaaataaaaaangggggccccgaaaaaaaaaaaaaaggggtccggttggaaaaaaaaaacaaaggggtccggttgcaaaaaaaa

SEQ ID NO: 53 - DNA, 373 bp, Homo sapiens
agtgcaggggaatggaatggaatggaatgaaatggaatggaatcttccggaatggaatggaatggaatggaatggaatggaatggaatggaatgcaatggattcaactcgattgcaatggaatggaatagaatggaatggaatggaatggaatggaattaaccagaatagaatggaatgtaatggaatggaacggaacggaacggagcggaacggaatgtaatggaatggaatggaaaggaatgcaatccacgtctattgcatttcttttgtatgggaatggccactaacccctgttcggaatggatatggtaatggattcggaaccggagggggaacacccaccccgtattgattatatgatagttaatttg

SEQ ID NO: 54 - DNA, 395 bp, Homo sapiens
  misc_feature (1)...(395): n = A,T,C or G
cgttgctgtcggggagattgagaccacggtgaaaccccgtctctactaaaaatacaaaaaattagccaggcatggtggcgggcgcctgtagtcccagctactcanagaggctgaggcaggagaatggcatgaacctgggaggtggagcttgcagtgagccgagatcgcgccactgcattccagcctgggcgacagggagactctgtctcaaaaaaaaaaaaaaggttaaaataaataaaacccgggggtttaaagggaacctttaacctttgggtttttcgggaaacccatcagggggagggggggttggctttgtgggaggatgggccccaggtttcctaaaggcctggaaataattttttagggataaaggcttccatcaagagacttttggg

SEQ ID NO: 55 - DNA, 303 bp, Homo sapiens
cccaggttcaagtgattctcctgcctcagccttccaagtagctgggattacaggtgtgcaccaccacgcctggctaattccatgcctggctctcttactgtaaatgagaataagaaagaatatactctgctcaaagtcttagtataatagcatgtctcaaaatagaaaattgggcagagtgttcatagggtttcagagactcagctggatgttaaaatcacccagggtctaggctgggtgcaatggctcatgcctgtaatcccagcactttgggaggccgaggcgggtggatcacaagggcag

SEQ ID NO: 56 - DNA, 236 bp, Homo sapiens
cgggatgctagatgactccatcagccaatatgttagcattatctagaggccttatgtgaagtcctagtggtcctttccagttctatgactttaaacatacaggtgaatcagagcttcaggaaggcctagaccaacagctattactgaagctcccatttgtgcttaggactatgcatagagaaactctcctttgggacttggttagggtccaaagccctaaggtcaaaacactaatt

SEQ ID NO: 57 - DNA, 317 bp, Homo sapiens
gggtatgcatcccattcccctctccccagactggacgctcttaaagggcaacacttatacctcatttagccttgtattccctgcacagggtaagcattaggtaactgcttgctgaattacttactttggattagagaagagcgaagatatagcacataaaagttactgaacagtacagtgtcaaactcagatcttagataaaatggttgtgtaacactgctgtgctaatgagtccattctgacccaaagtcaagaacaggagaatatgcttgtccataggtatgctcaggaacttctcagggagtaaaccaatcagc

SEQ ID NO: 58 - DNA, 315 bp, Homo sapiens
gattacaggcgtgcaccaccatgcccagctagtttttgtatttttaatagagatgaggtttcaccttgttggccaggctggtctcgactcctgaccttaggtgatccactcaccttggcctcccaaagtgctgggattacaggggtgagccactgcgcccggcctactacatacatttctaatgaaaagaaaaaaaaaattaattaagagggggggctttttttctggagacccgcatgggaaaaaagcttttgggggggttggcccacccccatttaaatcggggggaaaaaatggcttttttgggaaatttgg

SEQ ID NO: 59 - DNA, 416 bp, Homo sapiens
  misc_feature (1)...(416): n = A,T,C or G
ggcacgaggggagtcccaagaccctttcagggaggatctgtgaggtcaactgttggcactgtggcatgaatcaaggtggtggcagcaaacttctagtagttttgatatgtccttgatagaacaaatagcaatggttaactattaaatgttgacctagccagcgcagtggctcatgcctgtaatcccagcactttgggaggctgaggcgggcggatcacctgaggtcgggagttcgaggccagcctgaccaacatggagaaaccccgtctcttctaaaaatacaaaattagctgggcatggtggtgcatgcctgtaattccagctactcgggaggctgaggcaagagaatcgcttgaatccggtaggtggaggttgcagtgagccgagatcataccattgcactccagcccaggcan

SEQ ID NO: 60 - DNA, 264 bp, Homo sapiens
atccacccgcctcagcctcccaaagtgctgggattacaggcttgagccactgcgcctggccgccacaggcccactcttaaaaagataatgcataatataagattttgcttttcttttcttttgtttctttctgctctgacaggtaactttgattgtcattgacagttttaagaattcagtaccaaccactgaaagggtatgaatatccttgcttaaagaaagttaaaaagaccaggtgtagtggctcacgcctgtaatctcagt

SEQ ID NO: 61 - DNA, 407 bp, Homo sapiens
gttgctgtcgacatgatgtaataagaattcatttctgacatattttacatttctggcaatctcaactcttatttggaatacttctgtgcatttgtctgtccaccgtaattttagaaaagcatatccataacgtttacagttgtagtacagttgtggttagttatttgtagtgggattgaaagtaatttttttctttttatatttctatatttagtttgtttttttgttgttgttgctttttgagatggagtctcgctttgttgcccagactggagggcagtggcgcgatctcggctcactgcaacctctgcctcccgggttcaagcagttctgcctcagcctcccaagtagctgtgactaaaggtgcacgccgccatgcccagctaattttttgtattttagtagag

SEQ ID NO: 62 - DNA, 157 bp, Homo sapiens
ggtgcgtgcgcagatcagggatcgcgattgcgaatcctccgctgaggtgatttggatatccctagaacgttgagggcacgagtcgggtcctgagaccaggtcctcagccagcagagccacgttccttatgagcaccgtgggtttatttcattttcct

SEQ ID NO: 63 - DNA, 409 bp, Homo sapiens
cgttgctgtcggcagtttgcagctgcggcggggtcgggtccacccgcggtccccggaatgccggacggctgatcccgggtgctggtcactcgccgattcggggctgggaaggtttgccagaagcgggaaagatgggagatctgagcgctctcttggcatcgccacacccaggacttgctcgtgccgcaattccccacggaaacaaccgagttgaaacgagaagcttgctctctgggtgcagtagctagaaggcttcaggtaactccaaagccaacactgggtgaggcaacacacgccgcctcaggactcagcatttctttcaggctgcgttttcgtggcagacctacccagattgatggagaaagtttggctggcggataagaagtaacgcggaagatgtattattgtg

SEQ ID NO: 64 - DNA, 320 bp, Homo sapiens
  misc_feature (1)...(320): n = A,T,C or G
cggtctttaccttgttgcacaataacccataaaggtgggaagtggagcttgtatcagtgtgactacgtcaggcccaggtatcaggggggccaaggtgggctgctccccacagagggcatatttctctaattgcaaataggtatgctacaggccagtaggaaaccattcatctctggtttcccagtctagccctggcacgctgttgaccctcagttaatgatacctcgtgtgtgtgtgtgtgtgtgtgtgtgtgtgtgtgtgtgtgtgnntatttattttttttgggtttttttgatttgatgagggagtgggttttggag

SEQ ID NO: 65 - DNA, 288 bp, Homo sapiens
gacggggcttcaccatgttggtcagtctggtctcgaactcctgacctcgtgatccacccgcctcggcctaagaaagtgctgggattacaggcgtgagccaccggccgctgatggtattctttcctgagggcagattttcacgccagaagccccgacaattatacctgagctggttccacctaagctcaatcctccttccctgccccaagggggtgaaaaaatctgggcccaggaggtcttccttgtgctctggggggaggcatttaagggtccaaggaagacgtgacg

SEQ ID NO: 66 - DNA, 221 bp, Homo sapiens
caatgtttcccatgaaggaatcgaggtcccaagagtagttcaggtaaggaattaataagcatcacaggaggcatgtccaggctggcttgtccccaggccctctgccttcagccaccattctcagaagatccaaaaatgccaaggggaaagaagccggatgctttttcaccttaagtgaaaagtcagaattggaattaccctttctgaaggcctgctttgca

SEQ ID NO: 67 - DNA, 202 bp, Homo sapiens
ttggatcgggctgcgataagacgacaggaggggattgtgggtgagattctctcccaggccacaagacatttcctgctcggaaccttgtttactaatttccactgcttttaaggccctgcactgaaaatgcaagctcaggcgccggtggtcgttgtgacccatcctggagtcggtcccggtccggccccccagaactccatct

SEQ ID NO: 68 - DNA, 324 bp, Homo sapiens
cggagggtcggtattgattgatatatggaaatgtaggcacaggtttccaggaacccacatctttatatcccctaagagcatgcgattcacaattcacagatacagtgcttgaggcgagtttatagaacataactattggatataccatgacctaaaggcattcctttctaaatggaaatcgaaacacagagcctgacaatttaaggcacactaaattcccctttcttgtactttataagtaacgacggatgaggaaattatatacagtgtaaaacggggtttggcattgggctaccactgctaatgggtacatgacttgtgtgg

SEQ ID NO: 69 - DNA, 270 bp, Homo sapiens
aattcaatctatctgcttgatttgggacatccagtgctcttgctctgcgacattggagctccttgttcttaagcctttaaactcaggcagggattttcactatcagatctcctacttcctgtttttggaccttggtactcagactggagcttataccattggctttctggctcccaggccttcaggcttgaactagaactatactgcttgcttccctgggcctccagtttgcagatggcaatttatagaacttctcagccttcataatca

SEQ ID NO: 70 - DNA, 314 bp, Homo sapiens
gtcgtacgggttatacttcaccggacgactcctctcccccactcctttgtgagtctggtctcttgccagtttcttaccctgagtggagctaagcagataactcgtggttattccaagatagcatctgagtggagccacttcaggactagagggatgcgtcctggatctttggtctgtctcatgccttgcaccaagcttgagggtgacgtatcatgaccttgctggagtgattgaacttgatctattgagacgccattcaggatccctagaaacaagcacggtagactgctactgtgaggcaggtgtttcaacgt

SEQ ID NO: 71 - DNA, 291 bp, Homo sapiens
cctgtaatctcagctacttgggaggctgaggcaggagaatcgcttgaatccaggaggcagaggttgcagtgagccatgattgcgccactgcactccagcctgggtgacagcgagactctatctcaaaaaaaaaacagatttctctcctatgagagtttctggtctttgatgctgcactttcctcttctgaaacatcaagtgcttttaaagagggatggtgctgactgcctggttctgaggcatgaacgacactggtaggtgagagcaagatggtacagaggagttcaaatt

SEQ ID NO: 72 - DNA, 312 bp, Homo sapiens
  misc_feature (1)...(312): n = A,T,C or G
ggattacaagcgtgagccaccatgcctggccaatttttgtatttttagtagagacggggtttcatcatgttggccaggatggtctcaatctcttgacctcgtgattcacccaccttggcctcccaaagtgctggaattacaggtgtgagccactgcacccggcctttnttttttttttttttttttttgggaaaaggggggcctcattggggtccccacgatatcccaaaacccggggggaaaagaacaccctttatttgggccccaaagggggggaaattgtggaggggggccccacgcccttctcggtag

SEQ ID NO: 73 - DNA, 391 bp, Homo sapiens
ggcaccagcaaagaggaaacagacagtttgattgcatgtcctcagtgcaatgctgaatacctaatagtttttccaaaattgggtccagtggtttacgtcttggatcttgcagatagactgatctcaaaagcctgtccatttgctgcagcaggaataatgatcggctctatctattggacagctgtgacttatggagcagcgacagtgatgcaagctgtacgtcataaagaacgactggatgttatggacagagctgatcctttattccttttaattggacttcctactattcctgtcatgctgatattaggcaagatgattcgctgggaggactatgtgcttatactgtggcgcaaatactcgaataaactaccaattttaaatagtatat

SEQ ID NO: 74 - DNA, 275 bp, Homo sapiens
ggcccgcctccatggcgcaggtttacctatgtgactaacctgtgcgttctgctcatgcccgccatctttttgaaagaaaaaaacataagggaggtgggggggccttttttctggaattgtcccagcgaacatacctctgggggggttttgtcacaccccccttttttttgttttttccaccgttttttttttgaaaataggggaacaagttttgggggggggctcccttttgggcccgccttgcggggttcccttttctcctgggtgtccgctcg

SEQ ID NO: 75 - DNA, 322 bp, Homo sapiens
atgttggccaggctgacctcgtgatccacccacctcggcctcccgaattgctgggattacaggtgtgagccaccgcgcccagactaagtcccatctttatgtccgcttggctgttccacggccacctggaggggaggtaggtccagcgatgtgggaccctaggatttcagggtagaaaatttgccgcactacagttacaaaattattccaaggtttatgttcctcgggggattgctatactcacctgttatgcactggtggcaagttttgtttttttctaataattaaggggtgataatttttttcttaagcatagggggcg

SEQ ID NO: 76 - DNA, 319 bp, Homo sapiens
gagagagaggagaatgaggaaggacaggccagaaggtgctcatggatcccacagtgtagggcctggaggcctctgtaaagccatgaagggtgggtgaccacaacagtgcatgctctcaaaagaccactctgctggttagatggtagtcaagagacaggtcaccatgaccgtgagagaatggagaagtccagatgtatttgaagaaagctcagatctgcaaatgaaccgaggccgtgcacggaggctcacgcctataatcttaacactttgggaggccgaagcaggaggatcacttgaggtcacgaatttgagaccagcc

SEQ ID NO: 77 - DNA, 376 bp, Homo sapiens
caatggcatgatgtcggctcaccacaacctctacctcccgggttcaagtgattctcttgcctcagcctcccgaacaactgggattacaggcatgcgtcaccacacccggctaattttgtatttttagtagaaatggagtttctccatgttggtcaggctggtctcaaactcccgaactcaggtgatccccctgcctcaacctcccaaagtgctgggattacaggtgtgagccatggcgcccagccccttcggattctttctataagcaaattgtgccttggacatatgctttgaatgctttgagagaacctctcttcataagtggaaataaaatcatgatttaattgtatcacacgcattatggataatctatggg

SEQ ID NO: 78 - DNA, 376 bp, Homo sapiens
tacggctgccagaagacaacagaaggggtatcttcatcataggcacaagcccacagatgtggaacagtaaagttcacattctctttatatagtacaaatactcttcattaatatagcaggcccataaagatagtggcaattgggcaatatatgctttacttgtaggccattgatagatctctttaaatgaatagtattttctaccaaacaccaaagacagaaacaaaactcgtcaggctgagttgagctcataccttgaattgctcctctgtgttcttccttatcaatggagatcctcgtaagttgagagattctgtcaggaggtatttcatgtgggaatcccctgggctactgggtcacagcagtaactcagcga

SEQ ID NO: 79 - DNA, 339 bp, Homo sapiens
cccagctactcaggaggctgaggcaggagagtggcgtgaacgcgggaggcagagcttgcagtgagccaagattgcgccactgcactccagcctgggcgacagagcaagactccatctcaaaaaaaaaaaaaaaaaaaaccccctttaaaaaatttcaaaaacccatgggaggcttttataagggcgggcccctgaaaaaaaaaaatttggggcgctgaaggtggggcttttgaaacaccccaagccaaaaaaattttaaaaaggggtttttttaaaaaagaaaaaggcccggccccggggtttttggcttgtatccccccctttggaggggccgggggg

SEQ ID NO: 80 - DNA, 366 bp, Homo sapiens
gaaatctcgcagagcctgatggtatttggatagcatatacccaccagaggaacaggcttttatctagcataccacaggtctcccctttagcacatctgtgctcattttgaaactgtatagggaaggacattagatggctgggagaactctgaaggacagacctggatctcctgccatcttccaaaggtgaaacaacaaaaatccgccaggctttcagtcagaagcccggaagggccactcccaaggaacagaggcaagagcagaagtagatggagtcttactgaaactgaaacccagctcaattcctaatagggtgaagatatgagtacctcaatgcagtctgcttatcagaaaggcatatcatat

SEQ ID NO: 81 - DNA, 347 bp, Homo sapiens
aatgattagcacagagaatacgtttggtctcaaatattcccaccaaaatatacctccatggcaatcggggaaagggagagggtggtaaatgtcaacccatgagaaaggaagggtctggaggcacaaatcaaaggggacctaagtaggcaggaagtatcactgaaaaccttcaaaatcttgcattatacgacagcattaatttggccatttaaaatgtaaaaatgggccaggcgcagtgactcacgcctgtaatcccagcactttgggagggtgaggtgggcagatcacttgaggtcaggagttcgagaccagcctggccgacatggtgaaactccatctctactaat

SEQ ID NO: 82 - DNA, 167 bp, Homo sapiens
  misc_feature (1)...(167): n = A,T,C or G
ggagaattatttnaaaataaaaaaaaaataggggggggcggttttttcggaaaccccaacctggaaaaaacccttgggggggtggggccaccccccccttgaagggcggggaaaaaagggctttttttggaaaattggggggcttttggttttttttgaacccttag

SEQ ID NO: 83 - DNA, 303 bp, Homo sapiens
cctgtaatctcagctacttgggaggctgaggcaggagaatcgcttgaatccaggaggcagaggttgcagtgagccatgattgcgccactgcactccagcctgggtgacagcgagactctatctcaaaaaaaaaacagatttctctcctatgagagtttctggactttgatgctgcactttcctcttctgaaacatcaagggcttttaaagagggatggtgctgactgcctggttctgaggcatgaacgacactggtaggtgagagcaagatggtacagaggagttcaaatttgggtccaccat

SEQ ID NO: 84 - DNA, 178 bp, Homo sapiens
  misc_feature (1)...(178): n = A,T,C or G
tgatatcancctgcgactgcaagattcttactgcagtacagaactctttttctcccttgcacttttttttgacctggcatctttttatagggaaaaacggcctttgtcggcagtggcaaacttgcaaggaaagctgccgactctttggcaggctgatacagagcctgcactctggcan

SEQ ID NO: 85 - DNA, 381 bp, Homo sapiens
  misc_feature (1)...(381): n = A,T,C or G
actgcgcgcggcctagctggaaactttcctgcccagtatatcagtcatatttctcagcctcactagcagcaggatgtggccatgtttctggctaatgggatgtaaacggatatgttcagtgggacttcctagaagcttccttaaagggaagcagacaggccagaggaggtgcctcatgactagaatcccagcactttgggaggctgagctgggaggatcacttgaggccaggagtttgagaccagcctgggcaacatagtaagacaccatctttacaaaatataaattttttctttttttttttttgaaaaaaagnttggttttgccccccagcttgaaaggcaggggcccaatttaacctaattgggagccccccttccg

SEQ ID NO: 86 - DNA, 390 bp, Homo sapiens
  misc_feature (1)...(390): n = A,T,C or G
cgttgctgtcggaagaattcgcgccgcaggaaacnacctttttttttttttcttttttgttttttttttttttttttttttttttttttttttttttttccttccccccccccgggggttctctctttgggaaaaaaacaacgggagggggggggggaaaaacccccccccccgggctatcaaaaagggtgaacctttctccggccgccgggggggggaaaaaaccccccggggcccccaagaaaccccccccccaccttttttgcgccggggttttcaaaaaaaaaaaaaaaaaaccgggggccgcccccccccttacataaaaacgggggggggtgctcttcacaacaggccccccacgcgccgaggtgcccacaaaaactccccccc

SEQ ID NO: 87 - DNA, 361 bp, Homo sapiens
  misc_feature (1)...(361): n = A,T,C or G
ccttcatccgaggaatgtccccaaggcaggaggggagacatgcctgccatcaatggcattctctgcggggcatggactctgggggctctaaggggcttctgtagggggggcatgcccctggagaagttagggcagcttatggaagccccggagctccagcctcacctggccaaggggaccccacctcttacagagcanggcccagnctccctcattctccaaactacagagggggaggagcagggaatgagagcactgaaccaatgaggacagggctggggggctgggggaacctgccttccaactgggggacataaggcaagcttcgcaccatcttctgagtcaatcctgaatggaaccc

SEQ ID NO: 88 - DNA, 303 bp, Homo sapiens
gggctcagaatggcatgaacctgggaggcagagcttccagtgatctgagatcgtgccactgcactccatcctgggtgacagagcgagactccccatattaaaagggtgggaaaaaaaggcgggtgttgttgaacccgggggccccactttttttaaccccccggatgaggggggcaatacccttttttaacccgccaggaactttttttttttgtccaatcttgggggggttgttgttttttttaccgcaatcaagctcggaaccaggggcttccacaccctggtgccctttttatgagggcg

SEQ ID NO: 89 - DNA, 356 bp, Homo sapiens
gtagatgggagtacaggcacacaccaccacgcctgactaatttttgtagagacagggttttgccatgttgtccaggctgatcttgaactcctgatctcaggtgatctgcccgcctcggcttccgaaagtgctgggattacaggcatgagccaccatgcccggccgatgtctgcattttcataggtgaccactgaggctaaaaagcatcactattccaaatcactattccaaaggcattaactcctgatggtgacatctcaggcacttagacacttgtaatttattcatcaaacatgcctgagacagataacattttgctaggtgctcagtctgcaacgatgtattgaacttagtcc

SEQ ID NO: 90 - DNA, 335 bp, Homo sapiens
gtgccaaaggggagagactggattttgacgacagtaggagcaccttatgtagtacagagaagaaggcagagtatgtggatacagatgctgtgtggtggttggatgtggtggcggcaatttgcccatgttttattatcagggtttacattttttcactcccgcatgaagcttgagtggtaggacaggggaggaaatgttgaggatttgtggggagatttttgaaacaaccatcatatatgatggtatgaaagagattgccacggacctagttgagaggtgggataaaagcgcttttgttggggacccgcagggggggtggatattatggtggaagg

SEQ ID NO: 91 - DNA, 388 bp, Homo sapiens
  misc_feature (1)...(388): n = A,T,C or G
attcatggttctccatggcatctctggtcttcaacattattttgcatagggtctcagaagcttagtgtgagcggatgatatgggcacgaagcaaggcacccagaagtgggggcaactactctgctttctaaaatgcaagggaaccggaaaatccaggagccgtgccaaagtgagtgagtattttcttgggccaccaaaggggtctgaactggtgtggcttgagctcagtttttgtggttcagatagatttgaaaactcacttctccccattaagcactggaaggaattagtcacccttctttgtggaagtggagagattctccgagagctactcaacaggctcctttgaaaggttctcaggaccagcactgtgctgagtgtgtgtggn

SEQ ID NO: 92 - DNA, 348 bp, Homo sapiens
aggtttagccccaccaggcatctggttggggggccgaggtgaggactattgcatgcttctgtggtctgagttccctcagagtactaaaatggatttgtgtgtatgcaaggggaagagagttaggtgggtgcggacagaagcagtcttaactagaaatacacttactagggttttcctctttttttttttaaaactgtcatgccgggcacgggggctcgtgcctgtaatcccagcactttgggaggccgagggggggggatcacttgaaggttagaagttcaaaaccagcctggcctccttgataaaacaccattttttctaaaaaaaccgaaaattatgtgggcgcct

SEQ ID NO: 93 - DNA, 343 bp, Homo sapiens
agcctggccaacgtagtgaaaccccatctctactaaaaacacagaattagccaggcttggtggtgcgcacctgtaatcccagctactggggaggctgaggcaagagaatcacttgaacctaggaggcagaggttgcagtgagcctagatcgtgccactgcactccagcctgggctggacagagcaagactccatctctgaaaaataaaataaaataaaataaaacagaaaaacagaatagaagaagatagctaagaaccacagtggtcaagccagcctggcttcaacagagatgaatggagagaccacggtcagccccattaacagaagaactggggccagga

SEQ ID NO: 94 - DNA, 355 bp, Homo sapiens
gcagacacctgatagccaggcaggcaacgcctgctagagtttctggaccagtggtcccacttctgtgtgaactcagctggtgggttcagccacctgttgtcctgggaagcacctggacagtagggcatgcatctctacccaaacctgccactggtagccatgaaagccatgcctgcttagagctgcaagcccagcagtcctgcttctgcctgaactctgaaggcaggcacaaccccatgtttccctgggaagtacatggacagcagattacggccaacccagcaaggataaggcttgtctgacaactgcaacccccgcccaacttcatgagagaggtcaacatttaaattcagaa

SEQ ID NO: 95 - DNA, 402 bp, Homo sapiens
ggcacgagccgacacccggaagcctagttgcctggaggttctgagcgttctgttcggacctcctaccgttactctttcattcactcaagaaatgatttcttgagttcccggcctttgtcagagagatgaacgaggcacggtccgtgtccagctaaaggacagtatgactggaagagcgttgttttccaaggtacaggatgccgcgcctcctatgagccgaagggacgggaggccgcgtataggaggggaccgtccccgagcctcgccgagcctgcggtgtagacacctctggtggttagcgcgtgacgatctggtgaccgcgcatgtcgcgttccaaggaccgttcttaccagaaaatatctggctgtcgcgaatacatcttgctgggcccgccccgtaccg

SEQ ID NO: 96 - DNA, 392 bp, Homo sapiens
cgttgctgtcgcaaagcatggttgctgagtacccagagttgcgaggagttttttaactgatttagccaggtggcaatcatgagtgaatggatgaagaaaggccccttagaatggcaagattacatttacaaagaggtccgagtgacagccagtgagaagaatgagtataaaggatgggttttaactacagacccagtctctgccaatattgtccttgtgaacttccttgaagatggcagcatgtctgtgaccggaattatgggacatgctgtgcagactgttgaaactatgaatgaaggggaccatagagtgagggagaagctgatgcatttgttcacgtctggagactgcaaagcatacagcccagaggagtctgaagagagaaagaacag

SEQ ID NO: 97 - DNA, 378 bp, Homo sapiens
cgttgctgtcgctggtctcaggcggtctccgctcaacgatccttcctcaaagcatggttgctgagtacccagagttgcgaggagttttttaactgatttagccaggtggcaatcatgagtgaatggatgaagaaaggccccttagaatggcaagattacatttacaaagaggtccgagtgacagccagtgagaagaatgagtataaaggatgggttttaactacagacccagtctctgccaatattgtccttgtgaacttccttgaagatggcagcatgtctgtgaccggaattatgggacatgctgtgcagactgttgaaactatgaatgaaggggaccatagagtgagggagaagctgatgcatttgttcacgtct

SEQ ID NO: 98 - DNA, 400 bp, Homo sapiens
ggcacgagggagacagatggttttgaacttcagaaaaccactcattgttgcttcccctaagatgttactcaggctcccggcagccgtgtcaactcttcaagaaatggcaccaggaacaacatttaacccggtcattggtgattcatctgtggatccaaaaaaggttaagaccctcgtgttctgctccggcaaacatttctactccctggggaaacaaagagaatctctgggggccaagaagcatgactttgccatcatccgagtagaggaactctgccccttcccgttggattctttacagcaagagatgagcaaatacaaacattgttaaagatcatatttggagtcaggaggaacctcagaacatggggtccgtggtcgtttgtttctccaaggattg

SEQ ID NO: 99 - DNA, 403 bp, Homo sapiens
cgttgctgtcggataaattcgcgtgctaaggaggtgacactgttattgtttgtcctggccattatgtggtacatggcactttatccattgctgactccattgagttggaaggatatggcctaccagatgacattgtgatagaaaagaggggcaaaggcgacacttttgtggactgcactggtgctgatattaaaatctcaggcataaaatttgatcagcatgatgctgtagagggaatcttaattgatcaccgtggtaagactacgctggaaaactgtgtgctgcagcgtgagacgaccggagacacagcgcggacatcagcagagtttctaatgaagaactcggatttatatggagcgcagggtgctggtatttaaaaataacttgggagtcaatgcgcgcg

SEQ ID NO: 100 - DNA, 390 bp, Homo sapiens
tcaattccgctgctgtcgccactggcctttttttctgagcaacaaaggagtgcttcatctggggagtgggaacctgagccgcggctctatcgttcaaagagtttaaaaagcattaatgttcatggcgatctactacgaaaaagccatcctccaaaagtcagggagcgccatttttctgaaagcacttctattgacaatgccctgaggcgactgacccttgggaatgaattctctgtcaacaatgggtacatgcgaagattcaaatctttttctgaactcccctcctgcgatggaaatgaaagttgggcttatcgcaacgggaacaaaacaggacccaggtccgcgataactatattcagacctaacgactattgggaatcttggaaaaac

SEQ ID NO: 101 - DNA, 260 bp, Homo sapiens
agtgggatttgatggaaatgtgaaccatttttcctcttttctggctccaggttctacctcttcctgcaggaagtccacacaagctgggatgagggggaggcaagacaaaagggcagggcaagtttgacacaattaacacctcgatcatgcctccaaatgcagagggtctttcagggaaggagaatcaaaatgtacgggagaaaaatgacaggagacgacaggcacggtggctcacgcctgtaatcccagcactttgggag

SEQ ID NO: 102 - DNA, 333 bp, Homo sapiens
  misc_feature (1)...(333): n = A,T,C or G
ttttacgaatttcatctaaagtgtgtctggtatatctatgcatatgattcattttccatgttaccatgcacgctgactcttattgaaatagaccgctgggaggcagcatgatggagtgaaaatagcatgcacgttcaaatctgaaagatatgggtgcagacacctactattctgtgccatttggagaaagtcatccacctcctgtataggacttttcttggctttaaaatgaatagatgtcttgaggatattactggtctcaattaaatcaaaatttttgcaaaaaggtctgacactggccgggcgcggaggctcacgcctgtaatcccagcn

SEQ ID NO: 103 - DNA, 459 bp, Homo sapiens
  misc_feature (1)...(459): n = A,T,C or G
tgacggccttntgcagatcccctcgactcgaagtccggtgctgtcgggccaattctgctcaactgcttggtgaggctcgagttcagcctaatccatcagaacatgagtctcttgcatggctcaggactgtccactccgtacaccagaggactttgtgtttccattgcttcccaatgaagaattgagagagaaatacaggcgctacctcttcagggactatgtggagagtcattaccagctccagctgtgccctggtgcagactgccccatggttattcgggtacaggagcctatagctcgccgagtacagtgcaatcggtgcaacgaggtcttctgtttcaagtgtcgtcagatgtatcacgcacccacagactgtgccacaatccggaaatggctcacgaagtgtgcagacgactctgaaacagccaactacattagtgctcacactanagactgtcc

SEQ ID NO: 104 - DNA, 435 bp, Homo sapiens
tctcaatagacacttttatatagcagatgcctttatgagcatgcctgctctttcgggcgaagcggtctacgcttgcgagaaaacttatgaaggagaccctgctgtgtttttctgttgctcctcagtaactaaattttgcttcagatttctgcttttctaccatggggagcaagacaaggctttgctttgactgaatcccaacctggaaaaagccattatctccagcctcaacactgccacaagggggcataactgaatcagaggatatactctatctgagacaaggtatcaaagggatgccttccggtactactaactcaattcagttcattcatcatcagcatacatgtaattcatatatagcacaactgctcaggtacggaaaataatgctgacaagttggggttttttttttttttttttgaagagaaaacg

SEQ ID NO: 105 - DNA, 434 bp, Homo sapiens
  misc_feature (1)...(434): n = A,T,C or G
ttttgcaggatcccactcgattcaattccgtggctgtcggcctgattaactgccacggtcacgaggagtctaaggacacatccaatttccattggcatgcaaaatggaatccgagacagaaagaggaccttanccttcatatctggttttttcttatgaagcttcttctggttggaaacttggcaaatttcatcaggtaagaagtgctaaagtgaacctgtaaactttgtttcaaaaaacaaaaaccgaagtttaagaaatctaaagatggtgtcagccttagacagatctctggactgtaatctgggaaaggtcaaataagatctccaatcgtgtacaattccaaatacatttgagagcagtgggtctgaaaatgtggttcccagaccagcagcatcaacaccatgaaggaagttgttaaaaatgcaaattct

SEQ ID NO: 106 - DNA, 214 bp, Homo sapiens
  misc_feature (1)...(214): n = A,T,C or G
aaactctgttttaggataagtcactaatatagagatagctagttcaattgtgtctggcttcctatcacatcactagcacttagtacagaattggggtcctaanaatatttggcaatgatgacctgtgttgctttcaagaaagtattccaagtgatagggtccaccataatccatattgctttaactcttgtacaagtggacaaatttttctatt

SEQ ID NO: 107 - DNA, 243 bp, Homo sapiens
  misc_feature (1)...(243): n = A,T,C or G
gctttcccgggcgctgattcctgagtgctgagcgcgaacccgaggagatgaaccctttaactaaggtgaagctgatcaacgagctgaatgaacgagaggtccagcttggngtagcgcgataaaggtgtctggcactccgagtacaaagacagcgcctggatctttctgggagggcttgcttatgaactgactgaaggggacatcatctgtgtgttctcacaatatggggagattggtaacatt

SEQ ID NO: 108 - DNA, 426 bp, Homo sapiens
  misc_feature (1)...(426): n = A,T,C or G
atattctaattccgaagctggngggggggcaaaacaggtcattccatgtttgaaaggaagttgatgaaggagcctgggaaagcggggaattattcacagagagaaacgacagcagcgtaaacgtgataaggtgctgactgattctggttcattggattcaactatccctgggatagaaaataccatcacagttaccaccgagcaacttacaaccgcatcatttcctgttggttccaagaaaaatagaggtgattctcatctaaatgttcaagttagcaactttaaatctggaaaaggagattctacacttcaggtttcttcaggattgaatgaaaacctcactgtcaatggaggaggctggaatgaaaagtctgtaaaactctcctcacagatcagtgcaggtgaggagaagaggactccgttcac

SEQ ID NO: 109 - DNA, 124 bp, Homo sapiens
atctgcctcccctgtctgtaaggagcagcgggaacggagcttcggagcctcctcattgaaggtggtggggctgccggatctgggctgtggggcccttgtgccacgctcttgaggaagcccatgc

SEQ ID NO: 110 - DNA, 364 bp, Homo sapiens
gagcagactgaacaaatgatgtgagaatctcttcagttccaaccaagtggcgggaaccagctaagagttgggtactgctgaggaaaattgatgggcagttggtaaaataggtgtgaatgagagaaagctttgttggggaaccatggtgggtatgtgggcacgttctacattactacaagtattgggaatttcccaggggaacagcaaaatcttgtcttatttatgtttaattttaaaaaattcccactgggtgcagaggctcacgcctgtaatcccatcactttgggaggctgatgcaggcagatcacgaggtcaggagatcgagaccatcctggctaacacggtgaaaccccgtctgtactaa

SEQ ID NO: 111 - DNA, 421 bp, Homo sapiens
  misc_feature (1)...(421): n = A,T,C or G
cgttgctgtcggcctgataaactgccacggccacgaggagtctaaggacacatccaatttccatgcgcatccaaaatggaatccgagacagaaagaggaccttagccttcatatctgtttttttcttatgaagcttcttctggttggaaacttgtcaaatttcatcaggtaagaagtgctaaagtgaacctgtaaactttgtttcaaaaaacaaaaaccgaagtttaagaaatctaaagatggtgtcagccttagacagatctctggactgtaatctgggaaaggtcaaataagatctccaatcgtgtacaattccaaatacatttgagagcagtgggtctgaaaatgtggttcccagaccagcagcatcaacaccatgaaggaagttgttaaaaatgcaaattctcaggctctcccctgn

SEQ ID NO: 112 - DNA, 424 bp, Homo sapiens
tttttgcgtatcccactcgattcaattccgttggggtcggtggtgccaaaagccaaggtcatttgcacatattccatcaacctgtcaagaatggggcctgagtttataacccaaggcatggaagtgcatgcattctcttagctgggcaaacaattatactgtagttgtgatacaacacatgtggcttttatttgtactgcacatatccactgtacagccacttgggagtatcgtggttagcttgcagcaactgctgtctgcatttatactgtttattgcatattcttttccctggaagtgaaagagaaatgtttttcttgttgcattgattacattttataaatttgcttagctggaaagtttgggaaaagaggcctgtttgtcaattgtacaaccgattgtgaagctctagtgtgaatatttt

SEQ ID NO: 113 - DNA, 414 bp, Homo sapiens
cgttgctgtcgaaaaatacaaaaattagctgggcgtggtggcacatgcctgtaattccagctacttgggaggcgaagcagaagaattgttcgagcccaggaggtggaggttgcaatgagccaagatcgtgctactgcactccagcctgggtgacagagccagactgtttcaaaaaaaaaaaaaaaaggtaaaaaaccttttttttttatttttttaaggggaaaagaaaccttttttttacctttcattttcctttcggaaaaattcatttaacaaaaagggggcccaaaatggccccaaccttttaaaccctttcaatttgggcaaggtttttaaaaaccaaaaaaaaagggaattggccctccaaaaaaaaaataaaataccccaaaaaggggggcatggtttaaaatattc

SEQ ID NO: 114 - DNA, 415 bp, Homo sapiens
cgttgctgtcggaagaattcgcggccgcgcgacagcaacggtttcaagattcacctcctctcaccaaatatttaactacctgctgaatacgcctctgtactaggcacataatggaactaaaaaatgctcatgtccagtttttgtgttgagtgaacaatgctgcagaccctaataagattgggtacagatcggcatgcgcctgtagtcccagctactcaggagaattgcttgaacctaggaggtggaggttgcagtgagccgagatcgtgccactgcactccagtctgggcaacagagcgagactccatctcagaaaaaaagaaaaaaagactgggtacagatgtgatattggaagaaaaagatcaagctgatgaggttaggatacccaggccctttggacttaaagatcactagt

SEQ ID NO: 115 - DNA, 361 bp, Homo sapiens
  misc_feature (1)...(361): n = A,T,C or G
gagcagactgaacaaatgatgtgagaatctcttcagttccaaccaagtggcgggaaccagctaagagttgggtactgctgaggaaaattgatgggcagttggtaaaataggtgtgaatgagagaaagctttgttggggaaccatggtgggtatgtgggcacgttctacattactacaagtattgggaatttcccaggggaacagcaaaatcttgtcttatttatgtttaattttaaaaaattcccactgggtgcagtggctcacgcctgtaatcccagcactttgggaggctgaggcaggcagatcacgaggtcaggagatcgagaccatcctggctaacacggtgaaaccccgtctgtan

SEQ ID NO: 116 - DNA, 386 bp, Homo sapiens
  misc_feature (1)...(386): n = A,T,C or G
gggtaacctggagacattcagaaaatatctgtggaactcctgcattttgtgaggcactgcccacggcattggagagagagatgcctttgtggtggtcctaaaagagttcacagtctggccaggagacattgtacaaacagactataaatggctgtgcttcttttttttctaaagaatgttcagcgggagcacttgggacctacctgtgagagctgaggaaggcttcacagaagaggtcttgcttaagaggaaacatttggggccaggtgcagaggctaattttttgtattttcttcttagcagagatgcggtcnctcgcttttttcggaccattttcaacccttcactnaaagggtgctcctggagagggatctttttgtgccgtg

SEQ ID NO: 117 - DNA, 386 bp, Homo sapiens
  misc_feature (1)...(386): n = A,T,C or G
agtgcagtgatacaatcatgattcactgcagcctcaacctcctaggttcaaactatcctctaacctcagcctcctgaggagctgagactacaggtatgtaccactatgcctggctgtttttttaattttttgtagagatggggtctcactatgttgcctaagctgttcttgaacacctgggctcaagtgatcctcctaccttggcctcctaaagngctggaattacaggcatgagcccttgtgcccagggtctggaattctttagagaaatccttcatctgtcttaatagaaaaccatgccttattaggttactcacctttatatcaaaatttttcctgggtgggtgcagacgctatatctttgggaacaagaagtcctttataaa

SEQ ID NO: 118 - DNA, 385 bp, Homo sapiens
gggactcttgctaaaggccagccatggacttacacttacaaagcatcaccttatcaaaggtggaggaagatcaacttgatatcaagggtgaccagatttcagggaatagggattctcactaaactgactcccagaggtctcttttagcaaggcactcatgccaagcgcagtggctcatgcctgtaatcccaacactttgggaggctaaggcaggtggatcgtctgaggtctggagttcgagaccggcctggacaacatagtgaaacccagtctctactaataaaaaaaaaaaatgggccgtcacattggctcaggcctataatcccaacactttgggaggccgaggtgggtggatcacctgagggcaaaagtttgagacccgccc

SEQ ID NO: 119 - DNA, 386 bp, Homo sapiens
tattaataatgctaaacacttaccagctttgtaactttagctatctatcaccattgagttgtttcctaatctataaaatggtggtaatccctcatacgactgtggaactgatgaaataatatggcatatgtaaacatttggttcaagacctgctacattggatgaggaatgtcaacagtaaagtaaaattttgatctttgagtgtgtagtgagcttgttatgtcactttctgtggattctatttgacactcataaagaaaaactctaggtttaaaaatggaactaggccaggcgcagtggctcacacctataaccccagcactttgggaggctgaggcaggcagatggcttgagcccaggagttcaagaccaacctgggaaacatg

SEQ ID NO: 120 - DNA, 383 bp, Homo sapiens
tatttactacctggtcatttataaagaacagaaattgatttttcacagttctgcaggctggaaatccaagatgaagtcacctgtagttcagtgtctgcgtctaagagagtactttgttgctgcacccgccagagggaagaaatactgtatcttctcatgaaggaaggaaccgaaggtgggaatagggaccaaactccctctttcaagcctttttgtagtgacattaattcatttatgaggatgccaccatcatgacataatcatttcccaaaggatttcacctcctcccactgttgcattggggattaattttccaacacatgaattttgagggacacattcacaccatatgcactggtatatagtaactaggtggcccgatg

SEQ ID NO: 121 - DNA, 410 bp, Homo sapiens
ctgttgcccaggctggagtgcagtggtgcaatctcggctcactgcaagctctgcttcccaggttcacgccattctcctggctcagcctcccaagtagctgggactacaggcacccgccacagtgcctggctaattttttgtatttttagtagagacagggtttcaccatgtgagccaggatggtctcaatctcctgaccttgtgaaccacccgtctcggcctcccaaagtgctgggattacaggtgtgagccaccacgcctggcccatgaaccaagtgtttttaaggaaacaaaactatttttttaatcatcagatttatactagctatatggatattagcatatctggtaattatgaatctagaatttttttacatatttttataatactggtagctcaggtattggag

SEQ ID NO: 122 - DNA, 410 bp, Homo sapiens
  misc_feature (1)...(410): n = A,T,C or G
cgttgctgtcgaaaggacaaaaccctgactcccagtgagtctgaggccaaagctgaaaacagaacccaagaagcttaattcctgacctcagttccaatcaaacagcacgaattgtggtggacctccagctgtgctcagatggggggacacaatattggcagtaccctcttccttgccctccaggctgagtgccagtgtgggagcgtgctcatgagagccctgcacaagcgggttttgagcacatgctacgctctagccccgtggaagcctggactagttagaggcagagaacagctcaggacagacacctccctgcagagccaaacagagtgcagcgcctgcctcgctgggccatcctgagagctggggccttcccaggaaagagggagctcggngggcaccaccccatc

SEQ ID NO: 123 - DNA, 416 bp, Homo sapiens
  misc_feature (1)...(416): n = A,T,C or G
tacggctgcgtgaattatacagaagggtgcaatgttttggagggggagaagtatttcacacacataagtatgattttccccaaccagaccacaagctcttcaaggttaacaacaccctagcccaaccccctccccctcagacaattcttctgctctcctagagcagactttgatctagattggatctaaattgactcgaaatgtcaggaagaagagattaatgcacatggtccctttctctgagagaaggagtgatagagcaaagcttaagcctgggagggagatgaagctgcccagcactctcttcaccccgtctggggcttcgaagggggacaggtggaacactagagacagctggctgcctggtcccgagctccatgtgaacagcctcctcccaaatcttcctttggatctgn

SEQ ID NO: 124 - DNA, 382 bp, Homo sapiens
cgtctgtccatctgtcgtccctgccagcacagggggatggtcctggctctaggggctgcagaacacagcaaggcccagaggccagaggctgcaggcgggcctgagggtgaacttccccccgagaaagagtctctggaagagaatgaatggcccagcaggtagtgagaactctgtcactagggtatataagccgggatggacacagggaaggacatttctgcatcagtggtgggtccccatcagttaagagagcctgtgactctgtcgagggaccatggggggtggcaccagagcccagggcacctgagggcctgtctggatgcagctgctagtggtcataggacagcaaacactattcattggattctgacttaggcaggta

SEQ ID NO: 125 - DNA, 382 bp, Homo sapiens
tgatccacccgcctcagcctcccaaagtgctgggactatagacatgagccaccaaacttggctagaaattttctcttttttcccttagacggagtcttgctctgtcacccaggctggagtgcagtggcggaatctcgactcactggaatctatgactcccaagatcaagagagtttcctacctaagactcacgagcaactgggattacagacgcctgacagcatcgcctggctaaagattatattaatggtcgagatgcgggaatatactgaaggttacgccggcgacaagactacttaatggggcggaggggagaatacgacttaaacggtcccgcttggacaagacgaggaaaagcctctatttgcgagaacaaaagaat

SEQ ID NO: 126 - DNA, 411 bp, Homo sapiens
caataaccatgtggagaagctgtgacatttttaatttacaacctttctggggctcagacataaagttacctatccaaggttgcagttgggtagtggtgggaccaggatggacaactcattggccctgcctcaaaagccatacctcttctcctgctatgcagaatctgtttctcctgaatctctgtgatgctggtgggaattgtttgcatagaggaaggacaataaccctgccatcgtgagttaatgtccgggctggtcacagtggttcatgcctgtaatcccagcactttgggagtccaaggcaggcatatcatttgaggtcaggagtttaagaccagcctggctaacatagtgagaccctgtttctactaaaaatacaaaaataagccaggtgtggtggtgcatgactgt

SEQ ID NO: 127 - DNA, 412 bp, Homo sapiens
cgttgctgtcggaaaactacaaagcagcagttaacagatcaaggaaatggtaaatgtatagactttatgaataatatccatgttgaaaacgaatctttggataactttctaaaagaaacaaacaaagagaacttgctcgatatcttaacagaacctgagaggaagccagatcctaaattatataccagaagtaagccaaagactgactcttataatcaaaccaagaacagtttagttcctaaacaagccttgggcaaaagttcagttaatagtgctgttctgaaagatagggttaataaacaatttgttggagaaacacaaagcaggactttcccagtaaaatcacagcaactctctagaggagcagatcttgcaagaccaggagtaaaaccctcaaggacggttccctctc

SEQ ID NO: 128 - DNA, 373 bp, Homo sapiens
aaagcatcaaaaccttttctttaatcccaaagttactaaagtgatttaatacatttgataataccataatactgccattatctttaatctctctccaacttcctgccataaatcattttctcagagtggacctcaatttagggtagaattgctagttacatagatgatgtcaattgggaaatacaaaaaaattagccgggcgtggtggcaggtacctctagtcccagctactcgggaggctgaagcaggagaatggcgtgaacctgggaggccgagcttgcagtgagctgagatcgcgccattgcactccagcctgggcaacagagcgagactcccgtctcaaaatagatacctgatttctttttgacttcaa

SEQ ID NO: 129 - DNA, 401 bp, Homo sapiens
cgttgctgtcgccagcaccctggcatgttaatagttgttgaaagatctctgaataagggagtgtggttggctctctcaattgcaataccaatgggaccaccacggttttatctggttaacagcttcacagatccagaattttatgtaatttgtctgtgtatccagaattgatcatattccggagtctgactcatggtaacccagctgtcagtagactgatgcgtaagccaggtgcaaatttgtttactttactattgaagtagatacccttccaatgactgaaatcccatatttaggataccccattcctgctatggaaatacttaggagactaaattgtgaatcaaagtttgtgactgtgaggccgagtgcagtggctcacacctgtaatcccagcactt

SEQ ID NO: 130 - DNA, 374 bp, Homo sapiens
  misc_feature (1)...(374): n = A,T,C or G
gcactccagcctgggcaacaagagcgaaactccatctcaaaaaaaaagaaaaatgaacaataaaataatggtgggctgttcgggtgagggtagtgggtactctggggctctgccagagagtaaggactgagaccctctttcaacatctgagttcctcttcatgaattgccctcagaagggtggccagggccgggcgcggtggctcacacctgtaatcccaacactaggaggccgaggtgggcggatcacaatgtcaggagatcgagaccatcctggctaacatggtgaaactcntgtttcactannaatacaaaaaataggccaggcgcagtggctcacgcctgtaatccagcacttttggaggnccgagcggg

SEQ ID NO: 131 - DNA, 239 bp, Homo sapiens
  misc_feature (1)...(239): n = A,T,C or G
ctttataaaatgtctccatctttataacccaagacatctctctataatccaaagtttcattctcctttgaaatctcaacatatatattttcagaaggaaactacttgtaggtggtctgtcactattatctgtcataatttaacttctagacttgttgataagttcagattccaagttttagtacgatttactaaaaaaaaacctagcatgcagaaacaaaaatattttctctacagctn

SEQ ID NO: 132 - DNA, 372 bp, Homo sapiens
  misc_feature (1)...(372): n = A,T,C or G
gttggacaagattttatgtagtctatgcagccacttggtaataaagaaagcagcaaaagtggtagtcagcaatttgggccaactatcttacttttctgctctcttccaacagctctgctagatgcaagtgacagaaaattaatgaactcttgcaggaattctatcccaacctctggaattcaagaatgtcctctattttggctagttagaattgttagagtcattctccatggaaaatgacttgattcatagttattctattattaagaaaacaatggctggctgggtgcggtggctcacgcctgtaatcccagcactttgggaggcagaggtgggcggatcacgaggtcaggagatcgagaccatcctggn

SEQ ID NO: 133 - DNA, 399 bp, Homo sapiens
gccttctgttactttgtgtcccattagtacctgcctctatgccttaccattttgagcagatccttgagtgggatgatacgtgcaaaactgtgctttaggcagtttgttgttataggcacctgctctctactctgtttgctctcaacttagtaggtggagcagcaattttccttttttggtatatggaatattctggtaacttttttgcaactttaagaaatttcaagccaggtgcagtggctcacatctgtaatcccagcactttgggaggccgaggcaggtggatcacctgaggtcaggagttcaagaccagcctggccaacatggtgaaaccccatccctactaaatacaaaaaaaattagctgggcgtggtggcacattcctgtaatcccagctac

SEQ ID NO: 134 - DNA, 208 bp, Homo sapiens
tccctgaagtcatggactgtgccagtcttgtccactcctgtgtccccaggtcctgtcacaaggcctggcatgtggtagatttaaagtggattcgttattgcgcacacagctgttcactcctgattttccagtacctcttctgtgtcaggagctcttttatgtaaagcttgagatcacaggaacccgctggttaacagggttgtatccc

SEQ ID NO: 135 - DNA, 372 bp, Homo sapiens
actgtacaccagtggttctcttcaccaactataatgcctaattttcccgttaatttcctacttctggttactgtaaacaaagtaaatccctcattccctacagctgggccacaaaacccaggatagacccttgtaatctctgtgatccctggatgttcacatgagctcttgactgatgcccacttcctgcatgttggtcaacattttacctggatcctttggaaggaagggaaacaaaaaggatcagcaatatgaacctcttaatttgagtaaatgctaatcaaacccaataacaggccgggcatggtggttcacgcctgtaatcccaacactttgtgaggctgaggtgggtggatcacccgaggtcaggag

SEQ ID NO: 136 - DNA, 371 bp, Homo sapiens
ggattgtgcctgcactgaataaaaacaagcagctccaacttctcagggctgctctctggccactagagccaggcagtcacctagctgctgttatgctgcatacctgtctctgagtactcgcttcatccatcggccagggtctgtgggacagaccaggcaggtggtgccccatgtgaggaacgctgcaatggattgcaagggaacccctgaaaacaaatgtgaagcgactgagcattgttatccttataacaccaggacctaatgagctatagcgcctcggatggtattctttcgtcctcacactttgaatgctttttgtcccctccccccatcaaaaaccagggggtggggtctctcaccagctcgccccg

SEQ ID NO: 137 - DNA, 402 bp, Homo sapiens
ggcacgagaaaaagagagataatctctaaaattttgtgagttttctgatacttaactgtcaaaatacagcagatatctcaagtttcctcagttgtaaaatggacttattgaaacttgcagagtttttctacaaatttaaaatatcttatgtgtacagaaagggaaaaatagtaacattaccagggagaaacccagtaaacatcactttaggcaagtgatcaaagttgacatcacctgtaataaaacctatcaatatcatgtgcccccaaatatggtttgaggaggtagccatgtcacatctgtgacagtcttcccctaaatccataacctcagtctaatcatgtgaaaaatatcagagaaacccacatttagggtcattctacaaaaacctgacgagtactt

SEQ ID NO: 138 - DNA, 405 bp, Homo sapiens
cgttgctgtcgcaaactttgggtttatttataacgaaacacaggagaaggtttcagcagttgccccgagctgttttgtgcgtaatgaagtggctctttgattaaggagctctatttcttatttaactgatatcccactgccccactccacagaataggaaaatgaacaaatctttctctctgacttgtttacatcatttcacggaaacacatctttgtttgcaatgcagtattctttctctgtgctcgacagagatggggaggggcacacgaacttaagaggctctagaacaaacgctatgctgattatgacttggttccacttctcgcacagtgctagtcttaagtgtctaccacacctaaaggtaaaacccccctccttttagcctaaggggagggggggacg

SEQ ID NO: 139 - DNA, 398 bp, Homo sapiens
  misc_feature (1)...(398): n = A,T,C or G
ggcacgaggaaccttgctacaggtagaagggatgttaaagacttggtttccacaaatagctgcccagaagtcatcattgggtggtggcaagcatcagctgaccaagcattttccaagccaccacagtgattcagctgcttcctctcctgcatctcctatggaaaagatggaccagacacagctaggacatctagctttaaaaccaaagcagccttggcacctcacacaatggccagctatgaacctcacctggatccacaccactccaatttgcaacccccctctcagctccccaggtactatctcctttagccatggtcctttaggcactggaaccggcattggcgtcattcttttcctccagcatggagtgcaacccttcacccactctgccccan

SEQ ID NO: 140 - DNA, 402 bp, Homo sapiens
ggcacgaggttgactgcagagtgaaacatccttgcaaactcttcccacctccttcacgacactgagttgccatgtgaggttcttcaagtctgagagtggaagggatccctatggagactcctattaaacccctattagaggaagagattgagagacctagcaatgtgaagtaacaaagatcaggcagctgcaagtgactcctgaatcttgagtccagggctttcgccactacagtacagtggttttcttttctttggtcggggagagtgggctggaatggagagtgaggcccacaaattacctgcagagacgtggaggcgtgagggagaacatgcttgttaaatatgcaggtagattaggagacaccaaacagagattcagacacagtaaggctgggatgag

SEQ ID NO: 141 - DNA, 399 bp, Homo sapiens
  misc_feature (1)...(399): n = A,T,C or G
cgttgctgtcggtaagctaacaaacaatcgaggcacatacacacacacacatatatatattttttccttcaatgcaatgaatattttattgagcatcttatgtgggcaaggcactctatttgtgaaaaattcaaaagatcacctgcccttaggaatcctctggtcaactgtacgagaagaaggaagggggcaaggtgagacaagtaagcaaataattatggacttgacttctgggcagaagctatcacagctacatttgttaattgctcagttaagtgacctttgaaatgttctatagccatgtctccattaagaatatgaaatacggccgggcgcggtggctcacgcctgtaatcccagcactttgggaccccgagggaggtggatcatttgaggtcn

SEQ ID NO: 142 - DNA, 317 bp, Homo sapiens
cagagtttgcagtgagctgagatcgcaccactgcactccagcctgggcaacagagcgagacgtcgccaaattaaaaaaaccaaaaaaaaaagggggggggcctttttcttttttttccccaacttggaaaaatctttttttgtgtggggcccccccccccctggagggggggggaaaaaaccccttttttggaaaattttgggccccttttttttttgggggacccattaaatcccccaaaaaaaaagtaaaacacccccttggtttttttttttatttccgggccggggggggggggggggggttgttttccaccc

SEQ ID NO: 143 - DNA, 406 bp, Homo sapiens
gccgttgctgtcggcctgtaatcccatttacttgggaggctgaggcaggagaatcgcttgagcccgggaggcggaggttgcagtgagctgacatcgtgccactgcactctagtctgggtgacagagcaagactccatctcaaaaaaaaaaaaaaaaaaattttggaaacctaggggtttaaaaaaaaacaaaaacatttttcattttggggggtggaacccccaaaaaaaacccccatttaaagccaccctttttttaagggggaaggtcccaaaaaaaaggtgggcccccgcccttgtaccggataaaactcccaaaagcccccccaaaaaacatccccttggggggggggacttaacccggggggttttgggggagaatggttaagccccaaaagggggcctaa

SEQ ID NO: 144 - DNA, 398 bp, Homo sapiens
cgttgctgtcgggccccaggtggggagatgactccaggaggggacctgccaaggacctgggcagccagccacgtgttctgtgccctgccactgccagctccaaactcacagtgtcatggtggtgggttgttgggaaaacgtcctctgctcatacttctgacatcagttgtgtgggtattttcacaccaaacaattcttcaacttctggaaacgaattgggtatccaaggattccattcagcattgaacagaattgccagtgctgacactacaggagttagtacagaccccacagattaagggctcagtcccataagactgcccccacttcagatgccagtcacaacttccaggggctgcccatacttctgttccctcagcgcctctgcagatgtgagc

SEQ ID NO: 145 - DNA, 402 bp, Homo sapiens
ggcacgagcacagtatgaactactgctgatgtctctgttggggatcagagggctggcgggaacgcgagaagggcaccagcagcattccacacccagctcttcctcaccttcctgtctagtttgaatttcttttttttctttttcttttttttttttttaaattaaaaaggaaaaagggggggtggggaaaaaacctaaaccaaaaaaggggcataagggctaaaaccacccccagaaaggggcccttgtttgggggaacaagggctttgttaaccccccttgttttggttttgcacaaggtgggccctgcttaattttcaggggcctatgccccatttttggccctggggggctcggggctaaggctccacagggctgaaagtcccctgccaggttttaggg

SEQ ID NO: 146 - DNA, 406 bp, Homo sapiens
ggcacgagccccaccctgctgccttatttgtacccagggctttgacacaaacccagtgctttgcttatgggtgctcgctggggtccggtggagactgaccaccctgcttgagccaaagacaaggtgatgagagatggggagaggccattggctcccagagggaacagcgctggctgtggctagagaacagcaggtctgtgcagtgtctgagggcaggttgggaagggtagcagagagagagagacagaaagagagagagagagagagagagagagagagagagagagagagactctcagagtggaatgggggggacgcatctagacacattggctagtcacgcatgaaggagggagaagtacaggggatattataatggttttccccgggggagccttaggaatcg

SEQ ID NO: 147 - DNA, 372 bp, Homo sapiens
  misc_feature (1)...(372): n = A,T,C or G
gccggctctgccttttaactgcttttcactggtctgaggtgtatctgtataaatgggagtcatagggttgttgagattaaaaacaaaaatactcgcttgtaaaaacacagtgctgggcctacactaaatgtcccagaaatgtccttcctttgcttccttccactgggggggtctatatcatgagcccagtggtatggtatacccagggccaccctcctgtcttcctgcttgtccacccagagccggcttcttccatggcaggacctgcaaatgctggactcacagaaggctctgagaagtaaataacaggtgaggctgggggtgccttcttatttcttggngttgtccccagtctgttaagagacagtctaa

SEQ ID NO: 148 - DNA, 401 bp, Homo sapiens
acccatcgattcgaattccgctgctgtcgaggaaatggtaaatgtatatactttatgaataatatccatgttgaaaacgaatctttggataactttctaaaagaaacaaacaaagagaacttgctcgatatcttaacagaacctgagaggaagccagatcctaaattatataccagaagtaagccaaagactgactcttataatcaaaccaagaacagtttagttcctaaacaagccttgggcaaaagttcagttaatagtgctgttctgaaagatagggttaataaacaatttggtggagaaacacaaagcaggactttcccagtataatcacagcaactctctagaggagcagatcttgcaagaccatgagtaaaaccctcaaggacggttccctttcg

SEQ ID NO: 149 - DNA, 398 bp, Homo sapiens
ggcacgaggagccatgcgagcagctcgttcccttggagaaagaactgtaacagaactgatattacagcaccagaaccctcagcagttgtctgccaatctatgggccgctgtcagggctcgaggatgccagtttttagggccagctatgcaagaagaggccttgaagctggtgttactggcattagaagatggttctgccctctcaaggaaagttctggtactttttgttgtgcagagactagaaccaagatttcctcaggcatcaaaaacaagtattggtcatgttgtgcaactactgtatcgagcttcttgttttaaggttaccaaaagagatgaagactcttccctaatgcagctgaaggaggaatttcggagttatgaagcattacgcaaagaag

SEQ ID NO: 150 - DNA, 368 bp, Homo sapiens
ccaggctggtcttgaactcctgacctcaggttatctgcccaccttggcctcccaaagtgctgggattacaggtgtgagccactgcacccagcctcctttactgttctttaatttttaaaatgtactggagttttctcttccatgtaaatgttagaatcagcttaagttgtattaaaaatacctcattgggattttgtttgggattacattttaattgtagatttaaactttcctatgtaaccaacgtaatgtgggccctgttttggtgttttttataccttgaagcgattatagcttaatctttccggcccgtcactgtgggttactctctgtattggcaattatatttttttttctaatgaaaaaag

SEQ ID NO: 151 - DNA, 369 bp, Homo sapiens
atactgaaggtaatagggcaggctggttccatcagggctgagaggcctgctgaagatccttccacaagagctgttccttgagtctgtgtagacagttggaaattaaagtgagagaggagaaggaataatgaaggaggctgccatttaaaaatgtcttgcctgaaaactaggccgggagcggtggctcacgcctgtaatcccaacattttgggaggccgaggcgggcggatcacttgaggtcaggagtcgagaccagcctggccaacatggcgaaaccccgtctttactaaaaatacaaaaattagcaggacgtggcacacatctgtaatcccagctactcaggaagctgaggcatgagagtccgttgaa

SEQ ID NO: 152 - DNA, 364 bp, Homo sapiens
agagaggtgaggacagagacagctttattcagcagggaccgcagaggccccggagggcttcgtccagggagctggggagagaggaggagtcagagacaggagagacagacagagatggagagaaatggggggagagacagagacagaaatgggggtagagacagagacagagagaaatggtgggagagaggcagagagaagtgggggacagtcagagatagaaatggggaagagacagagatagaagtgggggagaggcagagacagagagaagtataggagagacagagatagaagtggagacagagacagagaagtgggggagagagagatagaaatgggggacagacagaagtttttatag

SEQ ID NO: 153 - DNA, 363 bp, Homo sapiens
  misc_feature (1)...(363): n = A,T,C or G
attagtgttatgaaacgaagcatcacactgctgcacacataggaggcatcttgtcgttcttatgctattgaccaaagaaggttctcttctcttgtataggccattctatttggccacggcaagatgtctattaattatatgagcaaggataggaaaccctcccagcccaccgtggcagacaatttagccctgcggatcaatgggataacagatgtctcagcctgaactctttcacagcagagcatttttccattcttgttgtggacttcagtgtgagcactgtgagagcaggaactgagtcttattcgtctttgggtcactagcacagaggctagcatttggatggaggtcactgctcttatn

SEQ ID NO: 154 - DNA, 343 bp, Homo sapiens
tctactgaaaatacaaaaatttgccaggtgtggtagtgcacgcatgtagtcctagctactcgggaggctgaggcaagagagtcacttgaacccgggaggcagaggttgcagtgaactgagattgtgccactgcactccagcctggccaggtgacagagcatgacttcttctcaaaaaaaaaaaagaaaggaactataaaattggggggggggggggaggtgaccccgcggggggccacttagggggtttaagaggtttcctttgggggaagggaacttaatttaatttttgaggggaaaatgagaagcccagggggtccgcccagaacgggtaaaaattgggt

SEQ ID NO: 155 - DNA, 147 bp, Homo sapiens
  misc_feature (1)...(147): n = A,T,C or G
cctaattgacgtttatacttaaaattcagagtacattacaaggacttctggttgttgagcttttaagaattatacagcagaatctttttcatctggntttatgagttgctgcaataggataaagctattgtaaattaatgggaactn

SEQ ID NO: 156 - DNA, 285 bp, Homo sapiens
  misc_feature (1)...(285): n = A,T,C or G
gaccatacatcattttccattctgggacagaggaagaagacgggtgggggagttgatctggctagcccagagctggacagtgccattctattcttccctcccacttgtctacacggtggttattactacttgctctgctgcccaggctggagtgcagtggtgcgatctcggctcactgcaacctctgcttcccagcttcaagcaattcttctgcctcaggctcccaagtagcaggcattacaggcgcctgccaccacgcccagctaattttctgtatttgtggtn

SEQ ID NO: 157 - DNA, 389 bp, Homo sapiens
  misc_feature (1)...(389): n = A,T,C or G
tacggctgctagaagactacagaaaggttctagagcacgcaacctagatccctcacatgtgcagttcacaatagggttcacactcctatgacaacctaatgctgccgctgatctcacaggaggcggaactcaggtgggtaatgctcgctggcccaccgttcgcatcctgttgcacagtccagttcctaacaggccacggaccagctgaggacccctgctctagagaatcgccaaatgtgagggtggtcatgaaagtttcaaacaggtgttaaaggcaaagcgatatactagaatcatcactgcatttttanagagcactattaggaagagctctcatctttctctcttgatcaaagtgcctttgaaacaaagagacttgcatctagaag

SEQ ID NO: 158 - DNA, 391 bp, Homo sapiens
ggcacgaggtcacccaggctgttttgttttggcgtgatctgcaacctctgccccccggggtcaagcgattctcctgcctcagcctcccgagtagctgagattacaggtgcgcgccaccacacttggctaatttttgtattattagtagagacggggtttcagcatgttggctaggccggtctctcctgacctcagggtgatcagcccacctcggtctcacaaagtgctgggattacaggcgtgagccaccttgcccagcccacatcatacagtttgaaatgaaactttgccacaaccagcctttgctgtagcacacacatatatcactgaacctgtttgaaataaaggattttttgtttttcatgactcggctttgagtacctccacgccg

SEQ ID NO: 159 - DNA, 361 bp, Homo sapiens
gtgctctgtgacccgagctagaaggcagtggcatgacctgactataggtcactgcagcctctaactcccgggctcaaacaaatctctcgcctcagcctcccaagtagctgggaatacaggtgtgagccactgtgtccagcccttaacttctcctttttatcagagtgtaaccaaaggtgtcctgaacactgagccctccagggtctcctctcatttcctcctgggctcgcttgcataccacggttgcaagcataccatgtctgatgggagggcccagaggtgaccatgctggaagggacaccagggctctgcagggtcttagtgtcagaggtcactgactttcttaagcacctggcatctg

SEQ ID NO: 160 - DNA, 394 bp, Homo sapiens
cgttgctgtcgggcacgggaaaataaatagtctttcgcgtgtggcagggtaaccttgtgctcagggaggtccgggaacctggacgatttcagtctgtcctgctcccctccccatgacacatacagcggcactcgtgcgctcaccatagaccggcggtcatatccgcacacagccacggccctcgaggtgcagtgcgaggcctcaggtggcagagggcacacccctggcagctctatttatttattgagacggagtttcactcttgtcgcccaggctgtagtgtagtggtgcgatctcggctcactgcagcctctgcctcccaggttcaagcgattcttccgccttagcctcctgaatagctgggactacaggcatgcaccaccacacccggctg

SEQ ID NO: 161 - DNA, 391 bp, Homo sapiens
ggcacgagggaattaccccccttgctcttggggggctgctagactgtcttgccgcggggagggatgttgactgcagagtgaaacatccttgcaaactcttcccacctccttcacgacactgagttgccatgtgaggttcttcaagtctgagagtggaagggatccctatggagactcctattaaacccctattagaggaagagattgagagacctagcaatgtgaagtaacaaagatcaggcagctgcaagtgactcctgaatcttgagtccagggctttcgccactacagtacagtggttttcttttctttggtcggggagagtgggctggaatggaaagtgaggcccacaaattacctgcagagacgtggaggcgtgagggagaacatg

SEQ ID NO: 162 - DNA, 366 bp, Homo sapiens
taagtgaccatttcttcactcctggttttccaattgttttgacactgacattcaattaggaggactaaatacacagtggtgatgatggtggtgattatatcattttatgatcaacaccttcttcactgtttgcttctcccaatattacttatgagacaggaacttactttttcttatggccctcaacaccccccagttgctcctagaaccctatctcttttctgatcccattacacaattttgaggttttcgttcccccccttatactttgttttcctgcgatttttgagggacctggggttttttctacctctcctttttctcttaaattttttctttctaacttagacctcccttccctttttg

SEQ ID NO: 163 - DNA, 394 bp, Homo sapiens
cgttgctgtcgggcacgtgccaccacgcccggccaatttttgtattcttagtggagacggggtttcgctatgttggtcaggctggttttgaactcctgatttccggtgatccaccaccctcggccttccaaagtgctgggattacaggcgtgagccaccgcgcctggccggaaatcatgtaatttaaaactatatatgggtgtcttaggcggcatcggtcccaactctaaagtacgcgttagacgggcctgggccagaagtgggccatggagacctcgggacccgcagggctgccgcccgacccagcgagcctctgaaggtgcaccgccacccccactgtttatcttactgcctcatagtaggcacattgtcgttctcaatataattgcacaca

SEQ ID NO: 164 - DNA, 368 bp, Homo sapiens
cgtctgtccatctgtcgtccctgccagcacagggggatggtcctggctctaggggctgcagaacacagcaaggcccagaggccagaggctgcaggcgggcctgagggtgaacttccccccgagaaagagtctctggaagagaatgaatggcccagcaggtagtgagaactctgtcactagggtatataagccgggatggacacagggaaggacatttctgcatcagtggtgggtccccatcagttaagagagcctgtgactctgtcgagggaccatggggggtggcaccagagcccagggcacctgagggcctgtctggatgcagctgctagtggtcataggacagcaaacactattcattggattct

SEQ ID NO: 165 - DNA, 397 bp, Homo sapiens
cgttgctgtcgcgctcaggaggcctgagcttggtccttttcctctctgcttggattctggaccaccacctgggaccaaccttcagctctggaaccttcataaagcaggtcagcgtggcctgattgtcccaggacctgaagggagcaaggatggcctcagggcctggagaagtctgctactctgtccttactgctgaacatcctgcttgtatcaggaaactcagaagcagtttgccttgtcaaattcaatctcaatggccattgtccacataactgatcacccatggctgcctctcctattatctattatcactgaaacttagtagcctgctttttttttttaaagctatggcgaatcttccctgttggggatccttgaacctggtttgagttttccc

SEQ ID NO: 166 - DNA, 314 bp, Homo sapiens
tccagtttaaaggaacatgggccgggcgcggtggctcatgcctgtaatctcagcactttgggaggccgaggagggaggaccacctgactttagaagatgaagaacaacctgtgcatcatgttgctgaacctgatctagaaaatggtggtaccacagcctccggcttagaacatgaaaagaagtgtgcagacttaccccttacggactctttatgagtttgttcccccctttggagacttcccctcgctgccttttctgcgtattataccccccaacatcttgggtgggtcccctcgctgaccttaaaaattaaa

SEQ ID NO: 167 - DNA, 396 bp, Homo sapiens
cggcggagctgtgagccggcgactcgggtccctgaggtctggattctttctccgctactgagacacggcgggtaggtccacaggcagatccaactgggagttgaagtgtgagtgagagtgaagaggaaccagcaggcttccggagggttgtgtggtcagtgactcagagtgagaaggccctcgaagtcgtcgtccctctcatgcggtgccacgcccatggaccttcttgtctcgtcacggccataactagggaggaaggagggccgaggagtggaggggctcaggcgaagctggggtgctgttgggggtatccgagtcccagaagcacctggaaccccgacagaagattctggactccccagacgggaccaggagagggacggcatgagcggtatg

SEQ ID NO: 168 - DNA, 397 bp, Homo sapiens
cgttgctgtcgggcacgtgccaccacgcccggccaatttttgtattcttagtggagacggggtttcgctatgttggtcaggctggttttgaactcctgatttccggtgatccaccaccctcggccttccaaagtgctgggattacaggcgtgagccaccgcgcctggccggaaatcatgtaatttaaaactatatatgggtgtcttaggcggcatcggtcccaactctaaagtacgcgttagacgggcctgggccagaagtgggccatggagacctcgggacccgcagggctgccgcccgacccagcgagcctctgaaggtgcaccgccacccccactgtttatcttactgcctcatagtaggcacattgtcgttctcaatataattgcacacagtt

SEQ ID NO: 169 - DNA, 183 bp, Homo sapiens
ctggtacgggtcggataatcttcgtaatggtgccggtgtgcctcgcttattaagttgatcgcttgtggaactatttccttgggagcgtgtgcgaatcccctgcgttttttttttgaatgacgtccattttttttcgtgaatgaagtgtcgttcttctttttcgttgtgctgtttctcatggcg

SEQ ID NO: 170 - DNA, 389 bp, Homo sapiens
cgttgctgtcggcagacacacacatgcagacaacacgcagacacacacatgcaggcactcacatgcaggcccatgcacacacacgtgcacacacatgcagagacatgcagacacgcaggcacacatgcacacatgcaaagacacgcatgcaggcacacgcagacgcacacagagacacacatgcagatacacatgcacacacacatacacacactggcccctgtttttctgtggtgtcactgggtgccagcaactcggtatctcccacctcccactaaaacctgggccttaatttctctcccgtccccacccctaaattcctgatggatgaacctagagctgtcctgtccactccaggccggactgacgtagcctatgggcccagcagg

SEQ ID NO: 171 - DNA, 396 bp, Homo sapiens
cgttgctgtcggcagacacacacatgcagacaacacgcagacacacacatgcaggcactcacatgcaggcccatgcacacacacgtgcacacacatgcagagacatgcagacacgcaggcacacatgcacacatgcaaagacacgcatgcaggcacacgcagacgcacacagagacacacatgctgatacacatgcacacacacatacacacactggcccctgtttttctgtggtgtcactgggtgccagcaactcggtatctcccacctcccactaaaacctgggccttaatttctctcccgtccccacccctaaattgctgatggatgaacctagagctgtcctgtgcactccaggccggactgacgtagcctatgggcccagcaggtccaggt

SEQ ID NO: 172 - DNA, 328 bp, Homo sapiens
  misc_feature (1)...(328): n = A,T,C or G
aaaccccgtctctactaaaaatacaaaaaattagccgggcgcggtggcgggcgcctgtagtcccagatactcgggaggctgaggcaggagaatggcgtgaacccgggaagcggagcttgcagtgagccgagattgcgccactgcagtccgcagtccggcctgggcgacagagcgagactccgtctcnnnnnanaaaaaaaaaaaaaaaaaaaggggggggggttttttccggaaaccccaactggaaaaaaaccttggggggggtgggcaaacccccctttaaagggggggaaaaaaagggttttttttggaaaatttggggccccta

SEQ ID NO: 173 - DNA, 358 bp, Homo sapiens
gcaggttgtacagaaagccaactaaggatgatcaaaaactttcagatgatcttgactgttcagttgaggtttgaaattaaaaatctatatgagcacctgactgtataattatgtaattttttttccagtaatataaagagccaaggaaagcaggtgggtaggtggatccaagattgagaatttgttggtgggctgtgcctgcaagtcaaagaactgtccttcaagccaagagttctggaggtcattcaatgggaaggctgaaggtcagatgctttgttaagactgaagcttggtcgggcacagtggctcacacttgtaatcccagcactttgggaggctgaggcaggtggatcacttg

SEQ ID NO: 174 - DNA, 300 bp, Homo sapiens
acaagggaactgggcaatgccttggtgaaattcaaacactagaattgatccctgaagagacagaaaccctaagcacaccatgaaaccaccggagaaagggaaaacgggttgagagatctactattttgaaaagtcaggcctggcgcggtggctcacgcctgtaatcccagcactttgggaggcgaagggagaatggcgtgaacccaggaggtggagcttacagtgagccgagatcaccccactgcactccagcctgggcagcagagtgagactccatcttaaaaaaaaaaaggaaaagaa

SEQ ID NO: 175 - DNA, 302 bp, Homo sapiens
tagtagagacggggtttcactatgttggccaggctgctctccaactcctgacttcatgtgatctgcctgccttggcctcccaaagtgcagggattacaggcgtgagccactgtgcctggtcttctcatttgcttttatttgtacatcaattttagcatgtattgctattagccttagatcataagtaattacaattatgtgtgtctatatcattgcatagttgcatttgcctgtttctcttacagattgtggcacactaggcatttttatttcccataaatcctagcacagagacttgtacg

SEQ ID NO: 176 - DNA, 325 bp, Homo sapiens
ctctccttgactgtaaaggcaatatcttagagtactttgtatctccagcacatagcaaattgctttgctagagtaggttttaacatatgtttttgggtaatggtggcgatgatgcaataaaggacagccgttattcaatttactctgtggcactaaggcaacttgaaaactctctgttgtaacctgacatagagctttgcatatagtaggaactcagcacatgtttggtagattttaagcaattattttttttctgtttggattagtctgttctcacaccgctgtgaagaaatacccaagactgggtaatttataaagaaaagaa

SEQ ID NO: 177 - DNA, 353 bp, Homo sapiens
atatcaaatggatgtgccggaaggcagggtgcggcagaggcaagtcagatcagcttctgccactactgattgtgtgactttgaacaaataagcctgtttccttaatgttaaagaagaaataccaatagtgtccaggtcatggtggcggcatgataattaaataatatgtgtaaggctccaggcagtcctttaccttacttttcctgaccagtaggaaatgttcaataataattaacggcaatttttctcactttgtcacaatgattcttatgaattatctagatgagaaggtagagctgaggtcatctttcccagtgtgacattcaaactcttttcacaatacttagagacac

SEQ ID NO: 178 - DNA, 329 bp, Homo sapiens
  misc_feature (1)...(329): n = A,T,C or G
attgtgttctgaaaggaaccaaggttccccagtaggctcaattccaagtagctttccccccaccactctgtggctctttattatttaggactgtgctttttaagctcccgttttcttaggggcattatcacaccagagtttcactgctgtccagagtttacctctgcatgaatgtctctaggctgattgctctctgctgagtactaacgaaggaaatccaacattcatgttctactttgggctttctgatgacacaggagcctggcttgtattcagtacacatatattgatgttatgtgacttgactaggccataanaacgataaatan

SEQ ID NO: 179 - DNA, 353 bp, Homo sapiens
ccgggttactcatcccatcctatgtcttctgaagtacccctgcaatccctaatgcctaatctctgtttgtctggctgcctacggaatgaggacaagctgaaagtctggcctctcagttttgtctcccactgcctgactacttttctattctcaacccagtccaccttcacatacccccagttgtgagtcggtcaggaggatgtttctggtcaatgagatgtacaaccggggacagtattagcggagccatggaagaaatggaatttcacgcgtgaatattttgacaaacatggccatgatttaagaactggcgggatttttctgggcccccaggtgatattatttggcccgaa

SEQ ID NO: 180 - DNA, 356 bp, Homo sapiens
gaggaaaatacttttctctagcatcgtaggaggaagaaaacaaacacatcagatattttcagcactaaaagagatggttttccccacatatatgtaaaagaaatttgcaagactactggattttgatctcatggttgcagtgggtgaataggtggccttttgtgatctccttcatcaccctggaagtgagacttcttcggtttcttctagagtcagtttggtatcagaatggcaaagcaacttaaccttccagaaaatacagatgattggacaaaagaggatgtaaatcagtggttagaaagtcataagattgaccaaaaacacagggaaattttgactgaacaagacgtgaatgg

SEQ ID NO: 181 - DNA, 352 bp, Homo sapiens
aattagttggtgaggaactaattataaagactattccaggtgctttagggttcagccacaacctatgataaggaatacctattataagtgggtgcttgtaatagatattaccatattatctatgcactcactttaatactcattgttctgggctccacctgatattatgatatgaatctttttagctatactctgatccagaagatcacatgattagcatcaatttctaaggacagtaataaacttgatagttctgagcaaatacatacactacagaatagtcattcaacaaatatttattgcctgcctactatgtagtctatatatacctatatgtaacacacatgcaaag

SEQ ID NO: 182 - DNA, 384 bp, Homo sapiens
  misc_feature (1)...(384): n = A,T,C or G
cgttgctgtcgggggagtggatgctgctgaattgtgattaattgggggagccatataggtacatttggcatgatctgggcctatgcggtcttacaatccctgtataaaactagacaatgaaaaacagaaaacaaaacaaacaaacaaaaaaacaagaacgaagcacctaccacatgccagctactgaggctatgaaggtattctccggccttagaaagcccaggattaatgcaggattgcgatatttaaacagaacatttccatacagcatgagtataaatgactttcccaagtttacactgagagtaactgacacagcaaccccagcaaagtctgagctgagtcctgaataattgtataaaaaggggagagaaacagagtgan

SEQ ID NO: 183 - DNA, 328 bp, Homo sapiens
gaagcctccccaggcccaaagactgggttagagcttctccctcctggtgcaatgcttcattaattacataaccaagtctattatacacaaagtgtaacctcccactagagtgggagttcctcaagggacttaaggtactcatcttcgttagcctagcacggtgctcagaaaacggtaagaataaaataggtatttactactcaggacatagtacagagttattgtatatttattgaactgaattgagctgtctagtttgccctttaaaaccaggtgttttagtatttggaaatatggacaatgatacctttggtgttccttaaattca

SEQ ID NO: 184 - DNA, 356 bp, Homo sapiens
  misc_feature (1)...(356): n = A,T,C or G
gtatatgatgttatgttatgttatgttatgttatgttattgttacagaattctaaatggtgacatagaaattatttcccttgagtatagtacatattgctgctaaataatagaacttgcctgattggtatggggggtggggtttgngaattanngataagnnanaattatgggacattgtagaatttttattgttttcaaattaatgcaaaataatgactagccctgtattgttgagacacagtcccttaggaggtttgctttaatgaacagataagaatcactggtgggcgggcgcagcggcttacgtttgtaatcccagctctttgggaggccgagtggggcagaacaccttga

SEQ ID NO: 185 - DNA, 352 bp, Homo sapiens
gatcgcgccactgcactccagcctgggcgacagagtgagactctgtctcaacaccaccaccaccaccaacaaattacttgtcgtttgaagccacccagtttgttgtggcagccctaggaaacggaaacccacaggtgtgtttcctaggagactgtgagtttcacgagctccatcctccctcccctatgccagatggccaagttttctgcttggcgcatctcctgagcctagcactgaggtgtccctcaggaactgtgcccatagactagtctacagattgtgaagtagaaacaggtcccccatgccaggcgcggtggctcacgcctgtaatcccagcactttgggaggccga

SEQ ID NO: 186 - DNA, 356 bp, Homo sapiens
taatgaaaaaagtgtttttaaattagcattttcaatggttttcagtctctgttaagcactgaccaagataagatgaggtgaggttgcagcaaattaacttgtattgcaggcataacacagaaaatctaggcctaaagaaaattagacactgagaaaagtagcggaaactgggaaatactcgtctttggaaaacactcctggtggggtagaatttctggaatacttttggatgtttcctttctggttccaaggactagattaagtggcctctgagtgagcaggttgggggcagagcctaaaccggggctgggtctatgttatctgtgtacaagcagagcagtggggtgaggagaata

SEQ ID NO: 187 - DNA, 355 bp, Homo sapiens
  misc_feature (1)...(355): n = A,T,C or G
ctggggttaagcggaaaattaaaaattcagaacaaccatagtctgttatctgtcacctgtaatttaggctaatatctcaattctcttgttatggacatttctcttacagtgtgtctttacataatgggtattggatgtaatgtgatcaattaattagagcatatgatttacattagtcaaacctgtattgattacaaaatgactatgatctgaaagtanccttgcgtgtgtgtgtgtgtgtgtgtgtgtgcgtgtgtgtgtgatataagaggagatcctgctttgtatgtggccaacttggggagggggatggaattttcactatattactgcgacgtgagcacacacctacggt

SEQ ID NO: 188 - DNA, 358 bp, Homo sapiens
ttctcctgactcagcctcccgagtagctgggactataggcacccaccatcacgcctggctaatttttttttttttgaatttttaagaaaaaagggggtttcaccgggttacccaggagggtctaaatcccctgacctcatgatccaccctctttagcctcccaaactgcggggattacaggggggagccaccgggcctggcccaccaggagctatttcatagggctctgggggccggggggttttttggaaaggggggttctttgatttacttggaaaatctcacccttcaaagcggggtttaaaaaccaccccactggaattggaaaaaattttttgaagggccttttcgaaccctc

SEQ ID NO: 189 - DNA, 301 bp, Homo sapiens
acaagggaactgggcaatgccttggtgaaattcaaacactagaattgatccctgaagagacagaaaccctaagcacaccatgaaaccaccggagaaagggaaaacgggttgagagatctactattttgaaaagtcaggcctggcgcggtggctcacgcctgtaatcccagcactttgggaggcgaaaggagaatggcgtgaacccatgaggtggagcttacagggagccgagatcaccccactgcactccaacctgggcagcagagtgagactccatctcacaaaaaaaaagaaaagaaag

SEQ ID NO: 190 - DNA, 386 bp, Homo sapiens
cgttgctgtcgctgaagggagcaaggatggcctcagggcctggtgaagtctgctactctgtccttactgctgaacatcctgcttgtatcaggaaactcagaagcagtttgccttgtcaaattcaatctcaatggccattgtccacataactgatcacccatggctgcctctcctattatctattatcactgaaacttaatagcctgcttttttttttttttttttaaaagctatggggattctcccctgtggggaacccttgacccggattggggtttcccctcctttgggaaaattataatccaaaagccttttttttttgtttaaattacggaggggcatcccctaaaggagtcgcctggccctcggggggaataacaaaggaa

SEQ ID NO: 191 - DNA, 386 bp, Homo sapiens
  misc_feature (1)...(386): n = A,T,C or G
cgttgctgtcgaaattgtatggagaatggtatttaaaaagtgtttggagactttgcagctgtcctataaaatgttgaagtgtgtatgtgatctacgtagaaagaatattaaagagtaggtggagctctttataggcgagtacagccttaaatatgcttgtatagcatccactgncagaagtaatagttgtgcctcagacttgggggttgcatgtcgccctgggggagttactacccttggtatgcatgagcgggtcctattagcatcagggggaactcaatactgtgtacgtatccacaaaagggatcttgacacccacaggtattcttaatttctgatattaacaaccgtacatactgctggaacttaaactaagaacatttagg

SEQ ID NO: 192 - DNA, 356 bp, Homo sapiens
  misc_feature (1)...(356): n = A,T,C or G
aaaggtcaagctgtgctatcactgttaccctagttttgggcttattggatgtgtccatagtgaagccaactccaggcctgacacccaggtttgactcgagggtcttcatgatccctggtctgtgcactcctgccacaggagagcggatttataacaaaagctggcagggtgcagtgactcacacctgtaatcccagcactttgggaggctgaggcgggtgatcacctgaggtcaggagtttcagaccagcctgaccaacatggtgaaaccctgtctctactaaaaatacaaaaattagctgggcatgttggtgggtgccagtaatcccagctactcgggagggaggctgaggcaan

SEQ ID NO: 193 - DNA, 357 bp, Homo sapiens
tgtcacccaagctggagtgcaatggtgcgatctcagctcactgcaacgtctgcctcccaggttcaagcgattctggggaggggaggaggagggaagcaaggagagaggaacgcagggagcagagcctgacctggtcacgggggtctgggaaagacagaggcttttgttagagccggcagctgagggccgaggccgagcaggggttaggccagcacaggacgaaaaggaagaaagttccaggtggagtctggtggagaaagaccgacctggaaggcaccagcatgtgcacgtggcaactgaggtcgaggacgtgcctgagaaagaggaggaaggtgccctgcggaccgggtagggtgc

SEQ ID NO: 194 - DNA, 357 bp, Homo sapiens
ttgaacctgggaggtggaggttgcggtgagccaaaatcacaccactgcactccagcctgggtgacagagcaagacttcgtacaaaaaaaaaaaacctagaaggttaaaatttttgttattttgacccaaagggaaaaaactagtttttagggtgggcgctgcctgtgaaaactgcttttcttaaaaggccaagttttccacactgttgaactttgacttgccaaacatgtcagcaggtctttcagctttcaggaaaaaaggaaggggagttccttggccagttgcctttttgtctgtttaccaaaggctcgggtattaacccagttttttgcaggccacaggagacagccggttgtg

SEQ ID NO: 195 - DNA, 357 bp, Homo sapiens
aggtgcccgtgtgtgtctacagagaggccaagcctggaacaggcgcctgtgtgtgtacagaggcagctggaaaccaagttacgtgaaagcctccaccagttaccctggggctcctggccagacgaggtttctgcagggaggacagactgaagctcaaatgggcagtagtgaaggcggtctccattgcggccaggctcaggccaccgcccagcaggagggaaggtgctggaagcttacgtgcccgtggacactggaggcttatgcacctggaccccagtgccatccaggtcttctctgtgggccaagggtgaaagaggcttcttgaaggctgagggagtcccagtgacggcctgagac

SEQ ID NO: 196 - DNA, 357 bp, Homo sapiens
atactactcttgaaattatcttctaaacaagttgatacattaggctatctgggaataatatgaagatacttgatttaattccaaaaaaagcacaattggttgactcacaattctggtactttagttaaacggttttgttcttatcttggcctgatgagataccataatttacacgaatattatctaaactaaactttttaatccagtatattagtgcgaactattcttttttttttttttgggatgggggcttgcttttgacctccagctgggtgggcaggggcgtattttggcctattgtgcgcccccccctccggggtaaaagaaattttccgcccctaacccccgaagaaacgg

SEQ ID NO: 197 - DNA, 352 bp, Homo sapiens
  misc_feature (1)...(352): n = A,T,C or G
aaaatgaaatctctcagaacctgatggtatttggatagcatatacccaccagaggaacaggcttttatctagcataccacaggtctcccctttagcacatctgtgctcattttgaaactgtatagggaaggacattagatggctgggagaactctgaaggacagacctggatctcctgccatcttccaaaggtgaaacaacaaaaatccgccaggctttcagtcagaagcccggaagggccactcccaaggaacagaggcaagagcagaagtagatggagtcttactgaaactgaaacccagctcaattcctaataggttgaagatatgattacctcaatgcagtctgcttn

SEQ ID NO: 198 - DNA, 353 bp, Homo sapiens
gaggaagaggctggggaccgcggcgaaggtggtgagtgctcttgggcgccttctcccaacgtccctgccagactcgcctccgggctgattctccagttggtttcctggactccagagtagctgtccggcctggccccggaggtgcaaagtaagaaaattgaagtcaaagaccatgggagatacagcaaaaccttatttcgtgaagcgcactaaagaccggggggctatggatgatgatgacttcagaaggggtcacccccaacaagattatttaataatagatgaccatgctaaaggccatggcagtaaaatggaaaagggccttcaaaaaaagaagataacaccagggaact

SEQ ID NO: 199 - DNA, 353 bp, Homo sapiens
  misc_feature (1)...(353): n = A,T,C or G
atagaagaaactaattaagagatggaaattcttgatttcttgttgaaatattataccaatttcctttttttccttgatatatgcaaaaccaagcctcatctcgagtatggctaatttaatcaatagtgggtatttctttatccaacatgttcttaaaaataatatacttgcatgaccacatgcacagaatatttgggatcaaatttcaattcaatacagtctcagagtaagtataacagaaaacctgttccttgacctataaggtattgaatagggattagtatctaaacttttgtagtttgaaagactcanacataagttcgccaattcaacaaagatatatgattccatac

SEQ ID NO: 200 - DNA, 329 bp, Homo sapiens
atcacttgaaacaagaaaacggagggctcagtgtgccaaaagaacaccgttgcactccagcctgggcaacaagaacgaagctccatcgcttagaaaaatccaaaaagaaaaaaaaccggggggggttttctccccccctcccggaggatgcgaagaacaaggttggtttttgtaaagcacaaaaaaaacgcgggggaaaaaatggaccttttttaaaaaccgtggaacgtttttgtctttttcgaggcctttttttctgggttaaaagatggggaaaagccgggggggttttttttattttttcggtccgggggggggggccagactat

SEQ ID NO: 201 - DNA, 385 bp, Homo sapiens
cgctgctgtcggttattatggataaactattattgttaattccgggcaagccacttgcctttctaggcctgcttctttgttcattaagcggggagcacggttcttgtgaggattacatgggagtgatgagtataaaggagactgcaaaccctatccagagccatcaccttgggagtgtcaccgtggtaatcagagtccgttattcctacaggagctccatccacaactgctctgcaggggacaatgggtgccctcattccccacagggctccctaccctctccatcgatacacactaacatatgggaaatgaaggcccaccctgccgggctttcatactctagaatgcgtgaatttttgctcttggcagcccattaaaagggcta

SEQ ID NO: 202 - DNA, 355 bp, Homo sapiens
  misc_feature (1)...(355): n = A,T,C or G
ttggtcagcgatgctggtgagatgtaacctcagaaaagcaagattaagttatagctatcccacagggcaccttcatgcaattagaagaaagtgtccctccagaagatgcagccccctccaagggccatgtcttggcaaattcatcagcccttgtataaattagaaaaagtcaacttccctggatagatgcagccccagaggtatatggctttgtgaagagccagatttcagcaccaactggcctacagaactatatgcggtggccctggttgtttttttgttaccagatacatagcaacttatcttgtgtactttgtcggctctctgtagtgaaacatgggatttattcctaatn

SEQ ID NO: 203 - DNA, 353 bp, Homo sapiens
acacggaggggtcacctgccccagcgccccacggtttccagccttggcctgtcctctttcacctggcccacgggtgatgcgtgctgtgctggcctttctgcagggtacagtgcggtcaggggactgctgggggctgtcagagccccagccctttgctccataccagggcagccgtttccagtcctgagggtttttgcgactgatcctggctgggacttgcttcttactaggagaagcaagagatccaagtccttcagtcagacgctgctctcagacatcagaggggcaggacactgaatgcacatgtgggttctgagggctcctttctctttgaaatcctgcaacaattaacg

SEQ ID NO: 204 - DNA, 385 bp, Homo sapiens
cgttgctgtcggtgtatttcattggaaattgatgacttgaaaaaaattaccaattcactgactgtgctttgcagtgaaaaacagaagcaagaaaagcaaagcaaagccaaaaagaagaagaaaggtgtggttcctggagggggattaaaagccaccatgaaagatgatctggcagattatggtggttatgatggaggatatgtacaagactatgaagacttcatgtgacattttatcttttcttggtgtcatctttatgttgcccacaatcccttgaacatgtagcacaacttcctttcctttcagttctgccaaatgctacaatcagaagtgcagtatcttttgtgctggttatttaaccccttgacacttaggtgctaatgtg

SEQ ID NO: 205 - DNA, 387 bp, Homo sapiens
cgttgctgtcggtgtatttcattggaaattgatgacttgaaaaaaattaccaattcactgactgtgctttgcagtgaaaaacagaagcacgaaaagcaaagcaaagccaaaaagaagaagaaaggtgtggttcctggagggggattaaaagccaccatgaaagatgatctggcagattatggtggttatgatggaggatatgtacaagactatgaagacttcatgtgacattttatcttttcttggtggcatctttatgttgcccacaatcccttgaacatgtagcacaacttcctttcctttcagttctgccacatgctacaatcagaagtgcagaatcttttgtgctggttatttaaccccttgacacttaggtgctaatgtgca

SEQ ID NO: 206 - DNA, 380 bp, Homo sapiens
cgttgctgtcgctggatagtagttgttcttcaggcacttggaggccttgtaatagctgctgttattaagtatgcagataatattttaaaaggatttgcaacctctttatcgataatattatcaacattgatctcctatttttggcttcaagattttgtgccaaccagtgtctttttccttggagccatccttgtaataacagctacttttttgtatggttatgatcccaaacctgcaggaaatcccactaaagcatagttgtatactatctttaactggtttttcacgatggggcactaggaatctcgacattaatcttgcacagaggacttctacagagtctgagaagatatcatcatgctgaatctgatcatactgtt

SEQ ID NO: 207 - DNA, 344 bp, Homo sapiens
  misc_feature (1)...(344): n = A,T,C or G
gatagtgaaaatattctcttactcaagagcttaaaaattagctattttataaaaattgtgtacatgtggattacaaaacctgtttcctttgtaaacagcagagcggtcttgattttcttaatgtctaaggtcattactctagaaatacaccctatggtgtccttgaggaaaccatggctatggcttttgtaactgggttacaaaatcagctcacgccgagtgcgatataaaagtcaacaggctctgagtgaggaataagagctctactctaggtaaaatgcttgaattttctgttctggatggctcangagactttttgagggggatctcagtgacattttgga

SEQ ID NO: 208 - DNA, 349 bp, Homo sapiens
tttgtgatctgtcatggtcatggtatttcagagttggaggatggtctgagttctgacctggtgtaggaatcccttctcccaaaactctaacagtacattctcaggcttcgtgagctcaggcttaagacacattattttctgatgctggacagcttctttaaaaaaatgtagtttcttacattaagctaaaatttattttatgaaagttcaagaattctggtccaaattgggatgaggcctatggtgcaggacttccgtgaaattttatgagattacaaatgcaaaacacttagaacagtttctggcctattgccagaattcaataattgaataaaggcaggcagaaata

SEQ ID NO: 209 - DNA, 346 bp, Homo sapiens
  misc_feature (1)...(346): n = A,T,C or G
cctggtctcaaagtctcagcctcaatcaatcctcccacctcagccttctgagtttctggaattacaggcatgagccaccacgcccagctaaatgactgcttttgaaccatacttttcttctgctttttccttatcaactgactttgtttaataaatccttgtctttaaggtcacagactttattgtaatttgtgggttagcatggaggtggggcaagaggtcccgtttctccaccaggtaaccaggccatgctgagaatacttccctcagacatttccttaagcatgttttgggaaggttatacttccacactggaattatataagtggaattgaataaaacccan

SEQ ID NO: 210 - DNA, 345 bp, Homo sapiens
ctaattacggctaatcacagtagaaaataaaacttgattccctttcctgcatggcttgagcatgaaataggagaagggacaagacaacctccgggtattgtttctaattctttaaaaagttgtacttgcagccaggcacggcggctcactcctgtaatcctagcactttgggaggctgaggcaggcggattgcctgagctcaggagttcgagaccagcctgcgcaacatggtgaaacgccgtctctactaaaaacacaaaaaattagccaggaatggcagtgtgcacctgtagtcccagctactcgggagactgaagcaggagaattgcttgaacccaggaggca

SEQ ID NO: 211 - DNA, 347 bp, Homo sapiens
ggcgacagagcgagactccaacttaaaaaaataaataaagaaaaacaggatgcatccagcttgtctcacacactctaccctgggtttatatttattatccacgaggaaacatccaaaatcaggggtcagagtcatggttccccaccttgtccatgacgagatgggccagtccacatcacaggcacaggtaggagaccccaacacagtgtccactgttcacattctaaaggtgactgtcggccaggcacggtggttcacgtctgtcatcccagcaatttgggaggccgaggcgagcagatcatccaaggtcaggagttcgagaccagcctggccaacacggtgaaacc

SEQ ID NO: 212 - DNA, 351 bp, Homo sapiens
atgtgtacacaatcttccagcatataccaatagctgaatttgtaagatattatatagtatttgcatgtgtatagctctttcttcatcttctgtgtacaactgaaatatttttttcatgtcctagtaaaaccctaaattgagaattacggactcactaaatgttagaccagctagtcatttagaaaacagtgcatgtgatttgtttaaggggcaggaagtattaggtgtcaacaattcaaatcactttgtgtcttttttttttgaaacggatgcctacttcttaaccccgcttggggggccagcacccaaatagcactttttgtacggggaaataagtacttagcgaggcac

SEQ ID NO: 213 - DNA, 348 bp, Homo sapiens
ttgtatattttagatgcctctttaaaaataaatttacatgatgagaccctgtctctaaaaaataaaaataaataaaataaaaataagctattttaaaagttagttatttaaattgaagaatgtggacaagatatactaacagtttctctaggactgatcacccattattccatgaataatagaaatttctgataaggatgttgcttaatggagattttcctatgttatctctgcggttctagtgggtggcaaaggcagctatccgggtagggcactgtaaaggtgtggccttagtcatttacactaggacaataagagaccctccacaagtgtgtaactggataaagg

SEQ ID NO: 214 - DNA, 129 bp, Homo sapiens
cggggacgggttcgggcataccgcatttagggagctttgcaaaaatagcataatatgggaattgtgagatgctactgcataaattgtcgcctatctaaattgaacataacgtgccacactcgactatac

SEQ ID NO: 215 - DNA, 373 bp, Homo sapiens
tacggcctgttatattacgacagaagggcacagctccacggacttagagcagataaggtaattgctgctccaacagcccagcctcgtccccagctcagagtctagtatgttagaaactggactgcctcctccccccacatcctcccctagtagcttcaggagggggacagcttcactgctgtccccatgcagatggtgcagtgcacataaaaggtgggctgcaggccaagcgtggtggctcacgtctgtaatcccagcactttgggaggccaaggcaggaggatcacttgaggtcaggagttcaagaccagcctggccagcatggtgaaatcccatctctactaaaaatgcaaataaaggccgggcgcggtgg

SEQ ID NO: 216 - DNA, 372 bp, Homo sapiens
cgttgctgtcgaaaaaatctttctaaacaacaaatacctaacattattactgattgttttcctaatttatcctcctaagttgaatggtaacaaagcttttccagctgaatgaatgcacttagctgataaaccagaatttgttcttttttttccttcttttttttttgaaacaggttctcactctgtcaccgaggttggagggcaggggaatgataatagctgactgcagcctcaaccttctgggctcaaaggatcctttcacctcagcctcctgagtagctgggaccacaggggggggccaccacaccgggctaattttaagggattttttttcctttttttttttacccatggtgcccagggtggacttgg

SEQ ID NO: 217 - DNA, 347 bp, Homo sapiens
agtgactagtacaagaagcgaatgctcctttcctctagtggacatgagaaaactatccaaaactgcagtcacctggtgttccagctggttgcgctatctgccgcttgccagatgcataaagctaccaggagattagttggtgggactggtaggaaataggggaaattatggtttaggtgttcatgatctctctgtgggaaaatgagggttatttttcccactgtcaaatgcccaaaggaattttaacaatctttttcttactcgcaccccattgtctttttgtttcaaaaggccaatttattttctcattattactacttattggctcggtgcgaggtagactttcc

SEQ ID NO: 218 - DNA, 351 bp, Homo sapiens
tggggtgggtgacaaaagctttgggcaaggatgtggaacaaatcttattttaatttggcttaattgacttaactacaaagcccatcatttacttgaagcacaaactataactctgatgttttctccattttaaaattataaatgcattaattaaaaataattaaagagcaaatcattaatagcaaactaccataacttgatactttttaacattaatacttaataggtttaatatctagcagggcgggggaaggcacagggataatataattatgtctgctctgagcaagggagtgacaataggtgtaccactgacttgtaatacagcagctacaccagctcttgaatgta

SEQ ID NO: 219 - DNA, 317 bp, Homo sapiens
gctggctgggcggccccacagacaggcagagccaagcactcccctctcaggcactctgccgcaggctggacagacagatcagctgggctagggcgtattgtcccctggcagacagacaaatctgcagctcctgagtggtttttgccccagccctgggacctcttgtttcctagcaacattcttaattcagagcgggcacggtggctcatgcctgtaatcccagcactttaggagggcaagacaggaggatggcttgagcccaggagttcaagaccagcctgggcaacatggtgagccctcatctctacaaataaatt

SEQ ID NO: 220 - DNA, 324 bp, Homo sapiens
  misc_feature (1)...(324): n = A,T,C or G
tagggtgtaaatgcctggatgctatagattccaatttaactatgaaaagaactgactcattcatttacatttctgttacagacagcccaggaggttacagtgagctcttcactaagaatctggacgaaatgcatcactaggggttgattcccaatctgatcaactgataatgggtgagagagcaggtaagagccaaagtcaccttagtggaaaggttaaaaaccagagcctggaaaccaagatgattgatttgacaaggtattttagtctagttttatatgaacggttgtatcagggtaaccaactcgatttgngatgaatctt

SEQ ID NO: 221 - DNA, 351 bp, Homo sapiens
gttcaccatgttggtcaggctggtcttgaactcctgacttcaggtgatccacccgtcttggcctcccaaagtgctgggattacaggcgtgagcccaccgcgcctggcttcggaattgcatcttaatctctgtggcggctgctattttgttttctaagttcatgagcacaggtggctgcctctatctttctcctccacttaagcaggaacaattcaggaggcagactccacccaatgctgcaaatcggccctattatcattgaccctgacagaatttcaggagtgtcaggccactccatactgcaaacagtacaggttgcttataatcgccaggaggaaagaaaatatccag

SEQ ID NO: 222 - DNA, 378 bp, Homo sapiens
tacggctgcttaagacgacttaagggggaatgacgcagcggctcttagaggaacatatggaaaacacccaagccggagtctctcacaagcttgaatgtgtgttctggagctgaaggatgcacggttgttaagcccctgttcttttccgttgtttaatctaatgttctttggaataaaaacctccctgccaagtagtacttggttttatgctcaacatgctttgactgttgaaaagagacctttggcacacattgaagggatggtgatggagatgccaatccatggaatcaggtggcgcagctatgttggtagctatagcagaagtcttcttggcaaagattcctcccgggaaggaaggtaccattggagaaccatgcg

SEQ ID NO: 223 - DNA, 347 bp, Homo sapiens
tgcgtttttttttacatgtgtgtattttgcttattttatgcatgtattttaaaatagcaagttgactttgttgcctctggagttccacagaaccagggtaatgcgtgggcatggaatactaacaaggagaaacagcttcctgtttaagaacaattcccatgttttttttttataggagaaaattgagagctgtttgggggctgccatactttacatttactttactctacatttaatgttttggtctccaagtaaagaagagtttcattagatgtagcaaaaacaaaacatatttttattcttcagagctttcaatgatgaaagaacgaaccttgaagatgaaaagg

SEQ ID NO: 224 - DNA, 349 bp, Homo sapiens
  misc_feature (1)...(349): n = A,T,C or G
aggtacgggggcgagagagacaacanaaggggagcacactgaacaaatgatgtgagaatctcttcagttccaaccaagtggcgggaaccagctaagagttgggtactgctgaggaaaattgatgggcagttggtaaaataggtgtgaatgagagaaagctttgttggggaaccatggtgggtatgtgggcacgttctacattactacaagtattgggaatttcccaggggaacagcaaaatcttggcttatttatgtttaattttaaaaaattcccactgggtgcagtggctcacgcctgtaatcccagcactttgggaggctgaggcaggcagatcacgaggtcaggg

SEQ ID NO: 225 - DNA, 344 bp, Homo sapiens
ggagatgcttttccttctgcatgttaactcacaactcattcctaatcatggaggctctaatccaactgactaaaatgcttttctccccacggaactaacgtagttacttgagagaagagagtaaaccagcttctcctgcgtggcacagggctatttttcattatagggaaacggacttctataagggcatttaccacatcccaagggctaatttctcatttaaaaaataggggcggtcgcggtggctcttgcttttaatcctaatacattgttttttttatgccggaggctcaggaactaaagtggaacaaaaacaatccccctttcaatatagaaatctttag

SEQ ID NO: 226 - DNA, 346 bp, Homo sapiens
tacaggctgagagcagaggctgaagtaaggggagttctaatctttgggtcagttgccctctccctgtgtcatttcttatgaaatagaagttatgctattcccaaaatacatacagcactaggcaaagtgttaagaagcctagattttgccagaaaccatgtggagtttggagcaagtcatttctactaactagggcttcctccttagcttataaaatggaaggggtagaccagatgaacatgaggtcttttttctcccccctctaagagtaaattgtctcaacaattttacaaggtgtttacaaaacaatacacattcacataaaggtgatgtatttatatctata

SEQ ID NO: 227 - DNA, 317 bp, Homo sapiens
gagcagactgaacaaatgatgtgagaatctcttcagttccaaccaagtggcgggaaccagctaagagttgggtactgctgaggaaaattgatgggcagttggtaaaataggtgtgaatgagagaaagctttgttggggaaccatggtgggtatgtgggcacgttctacattactacaagtattgggaatttcccaggggaacagcaaaatcttgtcttatttatgtttaattttaaaaaattcccactgggtgcagtggctcacgcctgtaatcccagcactttgggaggctgaggcaggcagatcacgaggtcagg

SEQ ID NO: 228 - DNA, 351 bp, Homo sapiens
  misc_feature (1)...(351): n = A,T,C or G
aagggtttctttttctccctttttttctttctattgttattatttttttactgagggttttgttagcttttaatcttgtggaactcagaaactcccattaatacggtttcatagaaaatagtcgtacaaatttgtctttgcatcttctctgcagaagcccctttgccagatgaattcacagagtgttttcttttggaatccttaggctaggcttacttatttgtgatatttgagtatgagtttgntttcccactagtatattacaactttgagggccaggagctgttttatgaatctttgagggcccctatctcataactgcgcgggttctttattttgatggcacatttg

SEQ ID NO: 229 - DNA, 346 bp, Homo sapiens
ttaacacagtgaaaccccgtctctactaaaaatacaaaaaattagccaggtgtggtggtgggcgcctgtagtcccagctacttgggaggctgaggcaggagaatggcgtgaacctgggaggcggagcttgcagtgagccgagattgcgccactgcactccagcctgggtgacagagcaagagtccgtctcaaaacaaaacaaaacaaaaaagaaaaaagaaaccaccaccaaccaaccaaacaaaacccaaaaaacccaaagtaacggaggtggccgagggagctggggatggggagggagtccaaacacctgggagctagaagtttctgaaaactgtaagtcttt

SEQ ID NO: 230 - DNA, 347 bp, Homo sapiens
  misc_feature (1)...(347): n = A,T,C or G
tgtgtgtgtgtgtgtgtgtgtcccaaggggtgtgtgggtgtgtgtgtgtcccaaggtgtgtgtgtgtcccaatggcagcctcagggtaaactgagcaaagaatgaattttgacattgcttgggagagcagaaaaggttctatgatgaggatgcaggtctcagacattccagcataggacagatgagccaaccttaagtcccagacagagtggaggagagtctattcccgcccctaccctgaggctgattgtcccagttccagaagggactcccaggaaaatccagcctggagaggctgcgcccggagcaattaataacaggacaaggccagcgagtggttttgcttn

SEQ ID NO: 231 - DNA, 238 bp, Homo sapiens
aacatcactggctcccatttctctgacatactaccaacatctgttcagttctaccacttacattacataaaaacccactagttcccaagttttgaatgtacatatgcatacaggcacacatgctcgcacacatatatacacatgcacacacacatatacacaatattatacaattgtttagggatttaaaaagcattccctggccaggcatggtggctcggcctgtaatcccagcact

SEQ ID NO: 232 - DNA, 376 bp, Homo sapiens
tactacggttgcgacatgacaacagacagtggtattctcttacggacgacaggtgccctgccgcgccaacaacgctgtatcacctggagctgtgataccgccgatttatctgccgcccgcatagcctgccgtccacggggtgtcagcgagattggaatatattttttgcacctcgcggacggcttgggagagtgaagattatcagctttatctttccaaatggagacaagtatgtttttctcctctgtttagatggtgactgtacaagaacatcttctggaatctacgagagaaatggaataggtattcataccactcctaatgggattgtctacacaggaagcggaaagatgacaagatgaatggttttggaaga

SEQ ID NO: 233 - DNA, 345 bp, Homo sapiens
gagtccccaagtggccatgttacatgtgatctgtgacatatacgatcagatgttacctgcatcctagggtcgcctggcatgcccatgagtgacgcttaggaccgtgcctggtgctggtgtgtggacaatgctgggccagtttgcccagggctatgcctgccacctctacttttatttcaccctctggaggcggacgcattggaaagcatgtggggcaggaggtgaggaaggaaattcagacaagctgagcagagcggccaggactggaatcttgggtgccaacccgcaaggtggggaaactgatttccatttcccagtaattacaggtcaataccacacctgaag

SEQ ID NO: 234 - DNA, 291 bp, Homo sapiens
tacggctccgagacgaccacagaagggagcctgggtgacagcgagactctatctcaaaaaaaaaacagatttctctcctatgagagtttctggcctttgatgctgcactttcctcttctgaaacatcaagggcttttaaagagggatggagctgactgcctggttctgaggcatgaacgacactggtaggtgagagcaagatggtacagaggagttcaaatttgggtccaccatcctgggctccgctgcatagtgttaggcagtcactgagctggttccttcccaccacat

SEQ ID NO: 235 - DNA, 351 bp, Homo sapiens
  misc_feature (1)...(351): n = A,T,C or G
tttctcttggcctaatatcctggctagattttggcagttccccactctaggggcaatgtcttttcagcctgcacctctgactcctagctggatggatgacttcaggatacacaatagaatcattcctgtgacttatctgcccacagtcccaaattcagttgcaaacttctcctgaaaggctgtttttgaataatgacagtgactggactcaccttgctcttctgcatactattaattcccctgccagtcaatctccctttttttggtcaaagtatagttgtatgtatatcgatctctggcttagtcccatctctttctttccctccaccagntctgtcattaaatgtagag

SEQ ID NO: 236 - DNA, 371 bp, Homo sapiens
ctacgcttgcgatgagacaacacaacggactgtcacacacgcacacacacacacacacgcacacagtcccttaccctctgcttagagttccccctctcctgcctgtacagatgtctgtgttatttggccccatcaaataggtgaattgagttgttcattaagggaggggaagagctcagatttttaagtgattatatttttgttttggacacagacatttcctaggaaggaaagtgtttttggtaatggaccacggaatcaaaacagattactcactgtttctgtccattagcgcatatgatggggagcacctcaaagaagtttagtcagagggataggggctaaagcattacattcatcctgaaaatgcc

SEQ ID NO: 237 - DNA, 350 bp, Homo sapiens
ggcggcgaatgtggtgagtgctcttgggcgccttctcccaacgtccctgccagactcgcctccgggctgattctccagttggtttcctggactccagagtagctgtccggcctggccccggaggtgcaaagtaagaaaattgaagtcaaagaccatgggagatacagcaagaccttatttcgtgaagcgcactaaagaccgggggactatggatgatgacttcagaaggggtcacccccaacaagattatttaataatagatgaccatgctaaaggccatggcagtaaaatggaaaagggccttcaaaaaaagaagataacaccagggaactatgggaatacccccagag

SEQ ID NO: 238 - DNA, 352 bp, Homo sapiens
aggtactggctctcagagagcatctctggatttgcccaggaccccaagtccatggcactttctgccatgagggaaggacataaagacttctgaatagcttttgctaccagctgatcatacagccctagggtcttcagcaaacacagctagtagccaaacggtggttacaacgggctttgggcgagactcagtgctttactgacctcaggtctgacccagcacagtcctagtggtggtggtcacaggggtaattttgtcaccccacacccagctccaggcaggttggcacacacagagagagtttccatttagggggagaaagtaaggaaatagaacaagagcctctgcctgg

SEQ ID NO: 239 - DNA, 372 bp, Homo sapiens
ggctcagctgattctgggcgctggatgggcggccttggcattaggtccagatttgggtcctaagtactgtgcccaaccggcccgaggggaagggggaggagacaggaaccgcgcccattttccggatcaggttcttggaaccagcccggaaatcctgggactcaatctgggggccagatctggaggcgatggtttttctagagacgggctgatgcagccccagtatgccgtcgcactcatttcccacattccaggaacggtccaggtctgcccttcatcggtttgggaactccgagacgactccctctctccacaactgcagggtgggccgcgctctgaaaacctggcaaagcgaagggggtccctcagacg

SEQ ID NO: 240 - DNA, 363 bp, Homo sapiens
cgtccgtatcatgatgtcaagatatcgagacccttctgtctaacacggcgaaccaccgtctctactaaaaatacaaaaagctatccgtgcgtggtgggggacgcctgtggtcccagctactccagaggctgctgcaggagaatcgcttgcaccaaggatgcggttctttgtatgagccaagatcacaccactgcactccagcgtgcatgacaatgtgagactctgtctcaaaacaaacaaacaaaacaaaacaaaaaaacgagacaagggcattcccccgggacaggcggtgagagtggggagtatccagaacacagccccttccttggccccaggccctggcgtcgggagtaactgacttca

SEQ ID NO: 241 - DNA, 335 bp, Homo sapiens
aaagatgggtccttaccttttgtaatgaaatatagaaaatacttattgtgactttgcagtagttaaacatagaaataaaacatattttgtacatagatcagtggttggatagactatttatacatgatatgaaatattgatgacttataaaagagaacgtatcagtgctatatgtattgagacatggagtgagaagctttattaaatttaaaaatgtttgaagaatagtgtgtagagtgtacttataaaaccaaaacaaaacaggagacaaacagaaaaagcatacctatgtgttcatatatttgaaaattcttccatgactgtaaagaaaactg

SEQ ID NO: 242 - DNA, 338 bp, Homo sapiens
actttacactaagctatggcaaccataaggaggcaagggctgtgatgtgagtgggtcttcagctaagctagagctgccgggcacatagcatgaggctgatgctaccgtgagactgtgtggaggcccacacagtccaagatatgcacaggagtctcataagattaatttacaaccaagaattacccaagcttggatacacacccaaaagaaggcagagatccaaacagatgtttgtacatcagtgttcctaacagcatttctcacaatagccaaaaggcagaaaccactgaagcgtcttatcgatggatgatggataaagaaaatgtggtatatacata

SEQ ID NO: 243 - DNA, 337 bp, Homo sapiens
  misc_feature (1)...(337): n = A,T,C or G
gccccttcggattctttctataagcaaattgcgccttggacataggctttgaatgctttgagagaacctctcttcataagtggaaataaaatcatgatttaattgtatcaaacgcattatggataatctatgggatttaatgaatcaataggtgaggctgagttggtaagaagtgaacgttacttctgcatttaaaaaaatacatttaactcaataggaagtaacagatgagtaattggaaaacattttaaacttgatcataaagaaataaaaattggccatgtgcagtggctcatgtctgtaatcccagcactttgggaggtaaggcgggcagatn

SEQ ID NO: 244 - DNA, 341 bp, Homo sapiens
tgcatatagtttttgtcttaatcagtgggatgagtcttaaggtaatttattgagaacagagaagggaggataggttgacaaacaaacattttcaagtgttgtattttggaaactttattaaatgcctactcaatatcagtatgtgaattttacccacacaaatgaacctattcaatagaaattttcttaattactcaacgtaatacacatgcacatgcgcacatgcacgcacacacacacacacgcacatacacacaaacataacccagcctccactacttaagatgagagtatagtctagttaaccaggaggttatgagagttcagataaagtttgtctt

SEQ ID NO: 245 - DNA, 366 bp, Homo sapiens
tacggctgctagaagacacagaagggtccaaggaagtgacataatcaatctgagctacattttctcgctattaatctggcagtgctatatggaaaggaagaaatggggtgtgggagtatagttagaattatattattgtggcttaaggctaaggaaacaatttctgacactggtaagggacaaaaggtatggaaagaggttggaagggacattattgcagaacaatcaacaagattaggcattattgggaactgggccacaaggtagaggaagaaagaatgataagtgactctgaggctttgagcttgggtggctaaaaatgtatagcactggaacacagcttttactacgtgatcgcttgtcgag

SEQ ID NO: 246 - DNA, 122 bp, Homo sapiens
  misc_feature (1)...(122): n = A,T,C or G
ggtccaatatggcggcgcccagtggcggtgtgaactgtgaggagttcgccgagttccaggaattactcaaggtgatgaggacaatcgatgacagaataatacatgaattaaacactacgggn

SEQ ID NO: 247 - DNA, 337 bp, Homo sapiens
  misc_feature (1)...(337): n = A,T,C or G
tttctgtcttattcactgttcctcctcagattcctagaactatgcttagcacaaaagagctgctccataactatttgttgaatgaatgagtgaatgattaagtaaataagtgcggtccttctttcctctggggtcccatttgctagcattgcccaggtgttgttaactgcttgagattttccttgtgacagcacacagtgtgaagggaagagaagaggactgcagtcactgtgtccatttagttcttgttaaagacttggggctgggcgtggaggctcatgcctgtaatcccagcactttgggaagccgaggcaggcggatcaaaaggtcgggagtn

SEQ ID NO: 248 - DNA, 340 bp, Homo sapiens
  misc_feature (1)...(340): n = A,T,C or G
ttctagtaacttgtactttccttaccaatgatctctttcctgcgctaagggttaacttaaacttatctcaaagttaatttataaaaaaaagtttgcctgattcaccttattaccaatattgttaccattaaaatcagtagtaacctggtactcaattactctgattagttttcttatatctagagttcacaaaaaacgtgagtgactgcctgtccttaacttttccctacatatgcctcttcattatggcttctgagtgaactgtagaattgctattttacaagtgatgtgaaaacttgtgcagtgtacaatatgtatgtcacacaattttacaacatan

SEQ ID NO: 249 - DNA, 339 bp, Homo sapiens
  misc_feature (1)...(339): n = A,T,C or G
aacacacccacaccaaagcacatcaagaaattcaaggatgcctgagaagaaaataagatattacaagcttctagaaataaaagaatgttcccatacaaaagatggagggttgaaatcactttagacttttaaatagtaacaatggaaataagatacttgagcaatgccttccaaaattctgaaggaatattattttaaaattagaattttatagccagccaaactatcatcagctgtaacagtaaaatgaaaatactttaaggctgggtgccgtggctcacacctgtaatcccagcactttgggaggccaaggcagacagatcactagagctcaagaan

SEQ ID NO: 250 - DNA, 337 bp, Homo sapiens
aaacctcgtctctactaaagatacaaaaaaactagctgggcgtggtggcatgcgcctgtaatcccagctatttgggaggctgaggcacagaatttcttaaacctgggaggcggaggcttcagtgagccaagattgcgccactgcgctccatcctgggggacagagcacgactccatcttaaatcaaagcaagaccaaagatggcatagaatccttcctggaaccttgcgcagagggaagagtaacattaacttcacacgggccactctgttcaccatctttgcttcaaaaagagcctaccctggaaggcccggccccggaaaccggattttggggtc

SEQ ID NO: 251 - DNA, 341 bp, Homo sapiens
aggctggtctggaactcatggcctcaagcgatctgccccgctctgcctcccaaagtgctgggattacaagtgtgagccaccgtgtccaccggggaaggcttttggtcagaacaatggctggcaaaaccacaggcatcggaaggccagagctagggatataatataaatgtccctacagtgtaacagatgatgctacataaagaaaatcccgtaatacacacgatttctgaatgtcctgctgaacattcggtgagtgaaaactaattatctgagagttgaacctatctttgttaataaacacaaagcggccgggcgcagtggctcacgcctgtaatcccagc

SEQ ID NO: 252 - DNA, 335 bp, Homo sapiens
gtatttattaagtatttaccctgaaataagtactgcacgaagcatattcattcagtattgtccagttgctcttagcatgaagtcactggtgtcaccttgatggcagtgatgagacaaattacttgtttcacctctttaaacatcagatagattgctggggacaaagagacagcatggcttccaaccattacacaagtcccccttctgcagccaggatcatgtctaggatgatgcagttatggaagacagcatgctgagtttctattaatttgatgaatcaccaaattgagaccagtggtggtggtgtccagggacaaagtgaattgcttcagcag

SEQ ID NO: 253 - DNA, 334 bp, Homo sapiens
cccaaagtgctgggattacaggtgtgagccaccgcgcccagcctctgaattacttttctgcttactcaaagattagcctgtattgcggtgctcacttaaatccagttgcaacattacaaaccagccttatatatttggacatgtttactgtttaatgtaccgtaaaaataggaaatttgggttgggtgcagtggctcacgcctgtaaccccagcactttgggaggcttaggcaggcggatcacctgaggtcaggagttcgagaccagcctggccaacatggtgaaataccctctccactaaaaatacaaaaattagccggtcactggggggcac

SEQ ID NO: 254 - DNA, 180 bp, Homo sapiens
ataggtaaatattaatagcaccaagcttttgtttaagccaaaaacctgagaatcacccttacttcctgctgaaacctcacattctacatctagccactgaaaaagctgctttgcattattttcaaaatacattccctagggccgggcgctgtggctcaagcctgtaatcctagcactttg

SEQ ID NO: 255 - DNA, 337 bp, Homo sapiens
acctcgatagaggtgagaaaataaggcgggaccctctaatattcattggacatctgtgcacagtactgtggtagcccctttcacatagtttacattcctggaatcttcaaaagaatttatagaattgctcttacgcctttttttattgatggaataaaacagataagaataccaaagaagaggctgggtgcggtggctcacgtctgtaatcccagcactttgggaggccgaggtgggcagatcatgaggtcaggagagcgagaccatcctggctaacacagtgaaaccccgtatctactaaaaataccaaaaaattagccaggcatgatggcgccac

SEQ ID NO: 256 - DNA, 342 bp, Homo sapiens
agtacaccaaaagagagaaggaggaatgaaacttaatattcacctgttaaaaccattaactacaaaccttctttttttttttttagaagggggggtcggctttaatcccaaaggggggggggagggggcattaatgggggggcggaaaacccaatttgccgggtgaaaccctttctatcgggctaaaaattccaaaatgttggaaaaaggggggccccccactccacccggataatattttggatataaaagaaaaacggggtctacggggggaacccaggggggtgaggattctgggacctatgggaaccacccccctatatccccaaaagggggggtaag

SEQ ID NO: 257 - DNA, 336 bp, Homo sapiens
tgatccagtaccactagtagtgacaatagaacccacccattgttctaagtgacaacacactgatgcaggtactattattttctcaaacaattggaatatagtctaatttgccgacagctgcaaagcagcagagccaggattcaaacccaggcagtctggccccagagtgcctgcttcaaatcactacatctcttcctctcttatacttattcatcagtagatgcctagatgtggggctttacacttcagcagatactaagagggccatgtaccaagcgccaagtactgaggaatacaaacataaatactgcttgagggccaggcgcggtggctcat

SEQ ID NO: 258 - DNA, 344 bp, Homo sapiens
cggggatgcggaagtacgcaccacagccatcatgcaaggctattgatgctctattagagaggaatgtgcagactgtgacacactttttgccattatgacctgctgcctgcaatgtgtccacgacgcctgcatacactttatcgttcagatgcacagcgagcagggggagagatctgggtctttgaccactatcttgagcagctgtgccagccccaggctgcatccacttcttggtattgggaaggacaaagccctatttacagacaagtctctattccatgcagcttaatgcaatcctgactcataaagtacctccaaaccaccgctccccagttgttccatgg

SEQ ID NO: 259 - DNA, 260 bp, Homo sapiens
ggacttccctctgtggctctgctcagaactggcggtttttcccagctccttgcccagaccaatacttccatgctgtcttcaagccctgcttcctgcacatctcccagcccagatggggagaacccatgtaagaaggtccactgggcttctgggaggagaaggacatcatccacagactcagagtccaagtcccacccggactcctccaagatacccaggtcccggagacccagccgcctgacagtgaagtatgaccgggg

SEQ ID NO: 260 - DNA, 333 bp, Homo sapiens
actactacttttcatgcaatacttcacatacaacttgagggttacagaatccagattaagcctctgttctggaaggattatcacagaaacccacatttacttatttcagagggggtcatctgcttcccctctgccctttctctaataaaacttcaaaaaaacagaatattgtcaggccggacgcggtggctcatgcctgtaatcccagcactttgggaggccgaggcaggcacatcacctgaggtcattactgacttctagaccagcctggccaatatggagaaaccctgactctactaaaaatacaaaaattagctgggcgcggtggcatgg

SEQ ID NO: 261 - DNA, 339 bp, Homo sapiens
agaatgtctgggtcactcccagggtgtaaaattagcacagcccagcatcctcacttaggtgagggacagggacgtcgagtcacctggtaagactccctgcaaaagaacaaaagtggccacctgcttagggctggtgaagaagctgttaaagtggatgaggtgctgtatatagaattataaattgtgtcatcccaaggagaacacttaaacaaaaagaattttcagtccactgtaaaaatatgaggaggcaagttaaattggataactctggaatgggtagaaagatgtcataataacgcacacatgcacacggatactcccaccactgagtgttacccc

SEQ ID NO: 262 - DNA, 337 bp, Homo sapiens
ggcagtcactgagctggttccttcccaccacattggggtgctcttgcctggcctgcctgtgttaggcagtcactgagctggttccttcccaccacattggggtgctcttgcctggcctgcctgtgttgcaggggggcggtgtcagaggagacaacatgaaagtgctgggaaagctggatacaaacacaagctgttgtttctaatcaaagttaaaactggctttatgctaaaggagtctttagtgcctcccaaaaaagtgagaacagtatttttccaggggcttctatgacctgctgacctttcttccaagacatccgtgagatttttcttattagag

SEQ ID NO: 263 - DNA, 339 bp, Homo sapiens
gagaccaatacttccatgctgtcttcaagccctgcttcctgcacatctcccagcccagatggggagaacccatgtaagaaggtccactgggcttctgggaggagaaggacatcatccacaggctcagagtccaagtcccacccggactcctccaagatacccaggtcccggagacccagccgcctgacagtgaagtatgaccggggccagctccagcgctggctggagatggagcaatgggtggatgctcaagttcaggagctcttccaggatcaagcaaccccttctgagcctgagattgacctggaagctctcatggatctatccacagaggagcat

SEQ ID NO: 264 - DNA, 338 bp, Homo sapiens
acattccgtctccagacctggcattcttactcacagctaagcaagaatagatggttactttgcaaaccatcaagtactatacaacataaggtaattatgaaagtcagagagagtatatgacttctatagttccacaactgattactcaaatacaagaacagaaccagttcaaccctatttccacagacttcttcgtcaatcaaatgaggatgatgtttcctattacaggccaccaaacattttagtaagtatgtaaataatgacaaaagtgtatggccaggccgggcacggtggctcatgcctgtaatcccaacactttgggaggccaaggcaggtgg

SEQ ID NO: 265 - DNA, 369 bp, Homo sapiens
tacggctgttagatgacgacagaagggtgtgtgagagtgtgggttgtgtgagatacatgtgtatgtgagtgtatgagtgtgtgagtgaatatgtgtgtgtaggaatgtgtgtgtaagtgaccttgtgagtgtgtaatgagtgtgtgtgagggtgtgcgagtgtatgagtgagcatgtgagtgtgtagtgtgtgtaatgagtgtgtgcgtgcatgcatgggcatgtgagtgtgtgagtacaagtgagtgtgtgagtgattgtaagagtgtgtgatgagtgtgagcatgtgtgagtgtgggggattgtatgagtgggtgtgaacatctgtgtgagttttggggtttatgaatgtgggatgagaattgtggt

SEQ ID NO: 266 - DNA, 365 bp, Homo sapiens
tacggctgctacaagacaacagaagggactacacggtctgtgccggaacaagagtcttgctcttgactggttaacctgccttgaatcagggcattcagggagacctcagacaggtctgcattgacctatctccacgcacaaggggcagcattagttagcccactgtcctcagggcttccagcaatgagacagctctgtcaagagaggcactgaagagtaaaagtggttgcttgttcaacggctttcaatgggattgctgctgaacatgagactcactgaaatgccgatgttaatatgtttgataactccaaatccatcaggcttgctaaggaataagagatgtccaaggtttgcggtggagaatt

SEQ ID NO: 267 - DNA, 342 bp, Homo sapiens
tgtgtgtgtgtgtgtgtgtgtcccaaggggtgtgtgggtgtgtgtgtgtcccaaggtgtgtgtgtgtcccaatggcagcctcagggaaaactgagcaaagaatgaattttgacattgcttgggagagcagaaaaggttctatgaggaggatgcaggtctcagacattccagcataagacagatgagccaaccttaagtcccagacagagtggaggagattctattcccgcccctaccctgaggctgattgtcccagttccagaagggactcccaggaaaatccagcctggagaggctgcgcccggagcaattaagaacaggacaaggccagcaagtggtttt

SEQ ID NO: 268 - DNA, 338 bp, Homo sapiens
gagggaggatcacttgagcccaggtattcgagaccagtcagaacaatatggtgagatccccttctctagttctttctttcttatttttttggcgagagggggactgagtctcgctctgtcgcccacactgacctttattcatacgtacaaaacttcacacagcacgttcctgagcctgccccacttcgtggcctaccttaacggaattataccaaaccatacctttggacaccggcagctctaactcaaaactggcagtcacccgttcaccccttttgaggaatgcatcccacttccacaggacctttaccgcgttccatccccctgccttcgttttg

SEQ ID NO: 269 - DNA, 339 bp, Homo sapiens
ttgggagtcaacagagtgatggagcctgtcctgtccttgcacttgatctccacattcatagtgtagccctcggccttgacatttaatgtcacagggtggactttcttttccacattgcagatcaaattaaagttcgcatctccttgctgctttggagtgaagaaaatatcaattgggaacctggttggggaacaaaacagcagattacctgactaggccaacttgtcaaaaccttaaaaaatatgagcctactgaattagcagattcattacgaggaaaaggaaactccaaattatgatgacattttaagatttgtggctatagtaaccaaaacagcgt

SEQ ID NO: 270 - DNA, 331 bp, Homo sapiens
atggccctacccactgctgctttggtccaggagcattgatgcttctcggctctcctctctcccctaggcctgcaggacaagctgaacaagagggactaagaggtgacagccttgacctcccagaccgagatgctcatggcccaagtaaggggtaaggctccctcccgtagggcagatgcggggggctttcactggggccgtgccattcagctgccaattaagcatggagtgggtcagggcctggcttagggtcccctccccgactctgctttgagaagaaaagggctggctggtcgcggtggctcgcgcctgtaatcccagcactttggga

SEQ ID NO: 271 - DNA, 235 bp, Homo sapiens
cttctgttgtagccctaggcaatctcgagccacagagacgtccccgctgacgagaaggaagtcctacgaccgagggcagcccattaggtgagatcatgttctagaatctgctccagagtcaccaccagtctagttcttggttacatgagtggctatgatgttctgctctgttgatcatcttgtacacagtgtaacctgggccagcttgactgagccattcaggttcacccagtgg

SEQ ID NO: 272 - DNA, 151 bp, Homo sapiens
gctgtcgacgtgttcttccggtggcggagcggcggattagccttcgcggggcaaaatggagctcgaggccatgagcagatataccagcccagtgaacccagctgtcttcccccatctgaacgtggtgcttttggccattggcatgttcttc

SEQ ID NO: 273 - DNA, 325 bp, Homo sapiens
gctcataaaactgctgataggaaagagttataggtctcactgttcaagaggcttgggttttaaagtcatattagcctcaagagataaggtcttggggtccttaagagtccagtggttagaaatgagatgtctgcagttagacctcttaacatcatcacggatatatttgtgtttaatcccagcactttgggaggccgaggcgggtggatcacctgaggtcaggagttcaagaccagcctggccaacgtggtgaaaccccatctctactaaaaatacaaaattagctgtttgtggtggcgtgcacctgtaatcccagcaacttggg

SEQ ID NO: 274 - DNA, 322 bp, Homo sapiens
gaaagtctacggagcattttctggggaatataattttaaaataagattaaatatcacataaaataaatacaaaactagatagtaaaattctgaaaaaaaaaaagaataagcctgaccagatactacactgaattgcaaaatcattgatatggttggaaacaggggcaaaaaaagcagacatgtcaattgagtaaaatagagcatactgaactagggtaaactcacatgagaatttaataaataataaagggggcttttaaatgagggggataaagaagaattatttaataaagggggtttgggtcaatgggctagccatggg

SEQ ID NO: 275 - DNA, 135 bp, Homo sapiens
  misc_feature (1)...(135): n = A,T,C or G
aaactctgttttaggataagtcactaatatagagatagctagttcaattgtgtctggcttcctatcacatcactagcacttagtacagaattggggtcctaaaaatatttggcaatgatgacctgtgttgctttn

SEQ ID NO: 276 - DNA, 327 bp, Homo sapiens
gaccaaaatacaagttcaatgaatgacgcagcagctctgagaggaacataaggaaaacacccaagccggagtctctcacaagcttgaatgtgtgttctggagctgaaggatgcacggttgttaagcccctgttcttttccgttgtttaatctaatgttctttggaataaaaacctccctgccaagtagtacttggttttatgctcaacatgctttgactgttgaaaagagacctttggcacacattgaagggatggtgatggagatgccaatccatggaatcaggtggcacagctatgttggtagctatagcagaagtcttcttggg

SEQ ID NO: 277 - DNA, 328 bp, Homo sapiens
tattaataatgctaaacacttaccagctttgtaactttagctatctatcaccattgagttgtttcctaatctataaaatggtggtaatccctcatacgactgtggaactgatgaaataatatggcatatgtaaacatttggttcaagacctgctacattggatgaggaatgtcaacagtaaagtaaaattttgatctttgagtgtgtagtgagcttgttatgtcactttctgtggattctatttgacactcataaagaaaaactctaggtttaaaaatggaactaggccaggcgcagtggctcacacctataaccccagcactttggg

SEQ ID NO: 278 - DNA, 329 bp, Homo sapiens
atttgtaactcacagggcagaataacagctctagagctcaatttatctggaggagattcagcacacctgcttctctttttccactggcatggctcttggtgcaaatttgtatttatgtaatagttagaaattaaacatcagcaccaacggaaaaatattcaacgccctttattaaacatcaaacaactttgtcaatgggaaaagctgccccaactggtttagatcttacctttcaacattgttgtcaaagtacctttccactctctggtaatgtctttgagagggtttgcttattggacctacaactatcttcccggatggagttgcct

SEQ ID NO: 279 - DNA, 303 bp, Homo sapiens
cggggcgtgaacccgggaggtggagcttgcagtgagccgagatcgcgccactgcactccagcctgagtgacagagcgaaactctgtcccaaaaaaaaaaaaaaaaaaaaaaaaaaaaggggggggtttttttcgtaaaccccaacgtgaaaaaaacctttggggggttgggcacacccccccttaaaggggggggaaaaaaaggctttttttggaaaattgggggggcttttgtttttttttgaaccctttaaggcggcaaaaaacaggttaaccaccacctttggtttttttttagggtgga

SEQ ID NO: 280 - DNA, 328 bp, Homo sapiens
gagccaccactcctggcccaaagtcaatacattttaaaaaaaaacctctccagtggctaagcccagcattgttatatgattaataaataaaatattgacatcgagggttgacaaacctagtactttttcctgaaatcttcagtgctgtctgtgagtatatttgcactgttatgtaccagcaactgtgcacataacaactggtatgatcaataagacatagtcctcgccagggccaggtgcagtaactcatgcctgtaatcccagcactttgggaggccgaggcaggcagatcacttgaagtcaggagttcgagaccggccttgccaag

SEQ ID NO: 281 - DNA, 297 bp, Homo sapiens
gtagaagctatatgttgttattgtattgctatttatctacttaaataactcttactgtagtatgtattgctcaaggacagagattgtgttgctcatctttgtgttatcccacttagcatagtttctaagcaaatagtatagttctttcatatatgcttatcaagtaaatgaatttgactctacctcctaatgaactattcagaaattcatgtttacgattttagcaatgagaacaccaagacttagcaatagagtatcaaagataatacaactagggagtagatctaaaataagaaa

SEQ ID NO: 282 - DNA, 277 bp, Homo sapiens
atccacgtgatactaagtgtaaacccctacgcttgtaactcttactcaaccattaacgaccgcaacaaagcaaattaaaagaacattacgattccagcaacattcaggtgaacatgaatgtgctcttcactgttttactgatatggaattgctacaacgtgaaggtcttgactgttagtggcccacccacttttgagtttaagcaaactagattcacttgctgtgggatgacctgatgctcttctgccacttttcaaataactacaaaggctttgtt

SEQ ID NO: 283 - DNA, 298 bp, Homo sapiens
ggaaaggaggtagaaggatgagaccctaacacctggtttctccttccacttcaggcatttgtcagattcttggactgcattgagtaggggaataagaagttgggcagaaatcccctaacatatgtcctggtttctcagggctaaagaggaaaacactgaatttcaaggcccaaccaagtcaagggcccccttagtaaatacactacactttgggctgggtgacctcaaggtccacacctaaggtaacatcaaggcgatccagaagtagatcttaaatgtagctcaatcttggctgggc

SEQ ID NO: 284 - DNA, 326 bp, Homo sapiens
agagacagggtttcaccatgttggccaggatggtctcaatctcttgaccttgtgatccaccctcctcagcctcccaaagtgctgggattacaggcatgagtcaccatgcctggcccacagtgaccctttaaaggaaaatgggagggacctacctcggaggttgtgcagaaaatgttggcttccccagcactagggtttggttccctcctaggtcctcccacagctgtgctttgacacataagcagcttctattaaagtgcctctttaatttgtctgtcattgccaccagaccacaagatactttggggcagggctgtatttcattg

SEQ ID NO: 285 - DNA, 328 bp, Homo sapiens
gtatttattaagtatttaccctgaaataagtactgcacgaagcatattcattcagtattgtccagttgctcttagcatgaagtcactggtgtcaccttgatggcagtgatgagacaaattacttgtttcacctctttaaacatcagatagattgctggggacaaagagacagcatggcttccaaccattacacaagtcccccttctgcagccaggatcatgtctaggatgatgcagttatggaagacagcatgctgagtttctattaatttgatgaatcaccaaattgagaccagtggtggtggtgtccaaggacaaagtgaattgtg

SEQ ID NO: 286 - DNA, 328 bp, Homo sapiens
  misc_feature (1)...(328): n = A,T,C or G
ggcagcatgaatcataattgtcaggaaaaacttcatagattccgctatagtatctccggtattgtatcaggacaatctataagacatttggagctacaccagttgaaaggtattggctcagtcagcccccttattcagttttgtaaattagggggccacttgaagaaaattctatggtttatgctaatacacatgtagctgaaaatataattacatttaaaatctgttgaatttaaatttactacagttttttttaaagatcatgctatccttcagtcagtcttgcagcaattttccaactcaatgtagaactaccaatgaaaagtgn

SEQ ID NO: 287 - DNA, 331 bp, Homo sapiens
tgagcttttcattacattgttgaaagatgaagaacgaaagctacttgttgatcagatgaggaagagatcccctagagtaaatctgtgcattaaacctgtaacttcattttatgatatcccaggttagctctctagtcggccagccaaaatgttggcatgttttgcccctctattcaaattaaccttgaaatatatttgaggattctctcttgttttaattaacacttgtgttggtaattaatagaaattcacctgtcttccgtatcagatttctgtataagcagttatgctctggagctctgccaagccaatgattagtacagattcagtc

SEQ ID NO: 288 - DNA, 329 bp, Homo sapiens
agttttcatattccttagtgttatcacactggtgcacttactgttttaccattttcccttccgatttcatttttctgttagcatttactactatctaacatatattttactcatttgtctgtgttccccatcagaatataacttcatgaggggagggattttctattacacttagtgaaaagtaaatccctcaagtaggaacactacaagtatgcacagttttttttttacagtaagtttgcttaatggctagtaaactatctcagccagtacctgagtgactattctgacttgtatcatttaacaagaaaaaaggcctggcgcgctgg

SEQ ID NO: 289 - DNA, 301 bp, Homo sapiens
  misc_feature (1)...(301): n = A,T,C or G
tcacaatgctttatatttttcagagaatatttgcattcattacatcaactgcaattcatagggattctgtgagctgatatgtcattacattacttctcaggtgaataatttagtggacttattaaaaattagaaaaaattagaaaccaggcatggtggctcatgcctgtaatcccagcactttgggaggctgaggcgggtggttcacctgaggtcaggagttcgagactagcctggccaacatgatgaaaccccatctatactaaaaatacaaaaattagctgggtgtgatggcatgcccn

SEQ ID NO: 290 - DNA, 328 bp, Homo sapiens
gaggaagaggctggggaccgcggcgaaggtggtgagtgctcttgggcgccttctcccaacgtccctgccagactcgcctccgggctgattctccagttggtttcctggactccagagtagctgtccggcctggccccggaggtgcaaagtaagaaaattgaagtcaaagaccatgggagatacagcaaaaccttatttcgtgaagcgcactaaagaccgggggactatggatgatgatgacttcagaaggggtcacccccaacaagattatttaataatagatgaccatgctaaaggccatggcagtaaaatggaaaagggccttcaa

SEQ ID NO: 291 - DNA, 326 bp, Homo sapiens
  misc_feature (1)...(326): n = A,T,C or G
ggacgttgctgacggctagtgaggctttagcccgcttcgagcgcccgggggcggtaaggcgcgatcatagcagctctaggtgaccttggtccggctccttgcgcccccttgccccagcctccttcgttgagacactatttgttgagtctttcctcttttcctggccctgacctagcgtggggcgacataagagcaatagccgggtgggggctgtgagaacggctggggttgggagcgaatttcggaaacccggaggacgagtatagccttgcaagatggaaaatgccctcccgggctggcgcggtggcctgtaatcccacctactn

SEQ ID NO: 292 - DNA, 324 bp, Homo sapiens
aaaaatcctaacggctcaaagaagtttgctaagggtcaggaagcaggggatacacgggcctctcctacccgtgtaggaggcaggaagggtcaaagcagaggccagctctcccagactgtgggggaagggctgggggggggaggcccacgaggactggccacagccaccatgcaggaacgtcctggtgtggcctggcctggctctcacagacccaaagcttccgtggagaatatgtctgtggttattaaacagacaggcctagtggaaacaaccctgccacctgcgtgttctctgagcctcagtttctttctttgggaaagagga

SEQ ID NO: 293 - DNA, 319 bp, Homo sapiens
  misc_feature (1)...(319): n = A,T,C or G
ttatgcggctgattaaaacgtcctaaacttagattgtggtgatggttgcaaaaccttgtgactacattaaaaagcattgaattgcacactttgggtgggtgaactttatggtatgtaagttatatctcaataaaaaattttataaactggtttattccaatggtagactgaaacaaaatgaaagtgtaacatattttgaacttcaattgaattataaggtcttttttttacatgataaaataatgtgcattatagcccaaatgtaatacattattcaatgatatatttccaagaatgctccttagctcagtgaatgagn

SEQ ID NO: 294 - DNA, 318 bp, Homo sapiens
ttttagtgtagtagtcaaagcattaatttctcacattgcaatttccttcaaagacataaatacaacctttctaatgactccttgttcatcaagatacctcttcaaattattctatttgtttcattcagtatattatctgtgtataccgatattacactcttttctttttttgagatggaatctcattctgttactgatgctggagtgaggtggcatgacctcggttcactgcaacctccacctcccaggttcaagcgattctcctgtctcagccccccaagtagctaggactacaggtgcacaccaccatgcctggct

SEQ ID NO: 295 - DNA, 322 bp, Homo sapiens
  misc_feature (1)...(322): n = A,T,C or G
gatgctttgtaccagtaccaaaatacaagttcaatgaatgacgcagcagctctgagaggaacataaggaaaacacccaagccggagtctctcacaagcttgaatgtgtgttctggagctgaaggatgcacggttgttaagcccctgttcttttccgttgtttaatctaatgttctttggaataaaaacctccctgccaagtagtacttggttttatgctcaacatgctttgactgttgaaaagagacctttggcacacattgaagggatggtgatggagatgccaatccatggaatcaggtggcacagctatgttggtagcn

SEQ ID NO: 296 - DNA, 318 bp, Homo sapiens
cttgagcacgcacacaccacttcttcaatgggtgtgaactagtgcatggttaaccttgtaggtgacaaaaaggctttgtttgtctgcatgatcatctctgggaagcggccagcgctctaaatttgaatgaggatcttcactgaagctcatacttataatcaaggagatcactgctaagaacgggaatttgtcctgcgttctgggactaacatacagagagcatctgatttcagtcacggtttgccactaccctataatgagagcagtcttatgttataaaagaacgaagccaactatattctctgacggataaacatt

SEQ ID NO: 297 - DNA, 317 bp, Homo sapiens
caaaaataaaataaaataaattagctgggcgtggtgacgcacacctgtagtcccagctacttcagaggccgaggtgggaggatcacttgatcctgggaggtggaggttgttgcgaactgatatggcgccactgcccttcatcctgggtgacttagtgatacccccagctctaaaagtcttcatgtataccttatctaggatgaatggattcttatgcatactgggcatacatgtagagctttgccgcattgacctattgtttacgaatctaatacacgatgtggatcctggggctgaacacttaattgattagggag

SEQ ID NO: 298 - DNA, 323 bp, Homo sapiens
gctcataaaactgctgataggaaagagttataggtctcactgttcaagaggcttgggttttaaagtcatattagcctcaagagataaggtcttggggtccttaagagtccagtggttagaaatgagatgtctgcagttagacctcttaacatcatcacggatatatttgtgtttaatcccagcactttgggaggccgaggcgggtggatcacctgaggtcaggagttcaagaccagcctggccaacgtggtgaaaccccatctctactaaaaatacaaaattagctgtttgtggtggcgtgcacctgtaatcccagcaacttg

SEQ ID NO: 299 - DNA, 320 bp, Homo sapiens
gttcaccatgttggtcaggctggtcttgaactcctgacttcaggtgatccacccgtcttggcctcccaaagtgctgggattacaggcgtgagcccaccgcgcctggcttcggaattgcatcttaatctctgtggcggctgctattttgttttctaagttcatgagcacaggtggctgcctctatctttctcctccacttaagcaggaacaattcatgaggcagactccacccaatgctgcaaatcggccctattatcattgaccctgacagaatttcaggagtgtcaggccactccatactggaaacagtacagggttgt

SEQ ID NO: 300 - DNA, 318 bp, Homo sapiens
gatgctttgtaccagtaccaaaatacaagttcaatgaatgacgcagcagctctgagaggaacataaggaaaacacccaagccggagtctctcacaagcttgaatgtgtgttctggagctgaaggatgcacggttgttaagcccctgttcttttccgttgtttaatctaatgttctttggaataaaaacctccctgccaagtagtacttggttttatgctcaacatgctttgactgttgaaaagagacctttggcacacattgaagggatggtgatggagatgccaatccatggaatcaagtggcacagctatgttggt

SEQ ID NO: 301 - DNA, 317 bp, Homo sapiens
  misc_feature (1)...(317): n = A,T,C or G
ccttgctaactttatttcagaaagtggtaaaatagctatggagtacagacccagtgaagagattgtagatgtcagatgggaagaagaactacacggtttaatataagtatgtggagataaaaactcaaaggtaacagggccgggcacagtggctcacacctgtaatgccagtgctttgggaggctgaggcgggtggatcacctgaggtcaggagttcaagatcagactgaccaacatggagaaatggtggcacatgcctgtaatcccagctactcgggaggctgaggcaggagaatcgcttggacccgggaagcggn

SEQ ID NO: 302 - DNA, 346 bp, Homo sapiens
taccgctgcgagaatacgacagaacggccatctttctaccatatgctagtaatatatggctggaatgctggtatgggaattactcccctctttgctgaaatagttcatctcttgtgtccttttcccctttttattcttctattcttcttagcctaagtgatggctgcgattggattcacaaggttgatattcctactcggctcatgtccacccacaagcagagaggagcccatcatcatcatttgttctgaatctgaatcccaagcacgaaaaataactccaaggctcttacttaagcttgcgagtctgctctgtcatgcggagagtccaccaccctgactggatg

SEQ ID NO: 303 - DNA, 322 bp, Homo sapiens
tagttgatgtgcccatctgccccacctctgcctggctgtacttgtagctagtacatgtatactatatatgtgcccgactgtttcattgtatgttccaggatggtcatgcctgagttttttttttttttttgggggggggtattctactttttttgcccgctttgaagtgcggacccataataacgttttaaagcctcaaaattttaaccttaaggggattaacctatttaatccttttggtttgtgggtgcttggtacctgccctaccaggcgggggaattttttaaaaattttttgaaaaaagggaattttaagttcttct

SEQ ID NO: 304 - DNA, 316 bp, Homo sapiens
aagttgacctcatcacctcagaaaatcagggataaaatctgtctttatattgtttcagggacttgggtatcagagacattatttgtttatcaagacctaacaaaacactttcttattctttaaaatttctgtgtgtgtgtgtgtgtgtgtgtgtgtgtgtgtgagaatattattacctttcacagagctcttttttaaaccttgatgtggaacgcacacagtgtgacaccatgtgtgcgccccttcacactcgaaacgcttataggattcattcagactctttttaaagcacaacattggggcagagaaagccacc

SEQ ID NO: 305 - DNA, 289 bp, Homo sapiens
tcacaatgctttatatttttcagagaatatttgcattcattacatcaactgcaattcatagggattctgtgagctgatatgtcattacattacttctcaggtgaataatttagtggacttattaaaaattagaaaaaattagaaaccaggcatggtggctcatgcctgtaatcccagcactttgggaggctgaggcgggtggttcacctgaggtcaggagttcgagactagcctggccaacatgatgaaaccccatctatactaaaaatacaaaaattagctgggtgtg

SEQ ID NO: 306 - DNA, 315 bp, Homo sapiens
tagtcccttgttctgaacatggtactgaacgtaaactttgatgtattgatgccctccagggctgtaaaattgtgtggggtttaccttattctttcactgaattttaccaaccattttgccagagtgtttggcgctgacattgatattctcgggcctcttgaagtgtatagagccctttgcccccaggctaacatgccttacatggctgtactgctctgcatagtgcttttcctgtgccctcttgtgattgcctctgttctctatgggcactcctcattcttgttggtggctaccttttgtcccaacaacctgacg

SEQ ID NO: 307 - DNA, 287 bp, Homo sapiens
tcttgggcgccttctcccaacgtccctgccatactcgcctccgggctgattctccagttggtttcctggactccagagtagctgtccggcctggccccggaggtgcaaagtaagaaaattgaagtcaaagaccatgggagatacagcaaaaccttatttcgtgaagcgcactaaagaccgggggactatggatgatgatgacttcagaaggggtcacccccaacaagattatttaataatagatgaccatgctaaaggccatggcagtaaaatggaaaagggccttc

SEQ ID NO: 308 - DNA, 207 bp, Homo sapiens
cagggcagcctgcaaccacacaggttgcatcccatgaagctggccccggatatgtgtgacttgctgtcacttttggcttcaacaacagacaacttgactcaaaatggcttgaggggacttactacttcatgccaagagaagcctggaggtagggcaggtccagccacggttggttaaaattcagctgccaaaccatgccatgaaggg

SEQ ID NO: 309 - DNA, 319 bp, Homo sapiens
gagaggaggctcagggaaaggtgaaagatgctatgggctggttaactctgcaaaaggaaaaactacagaagttgctaaaggattcagagaatgatacctactttaaaaagtataatagcctgctgtcctttatggagtcattcaatgaagaaaaaaagtcctttttggatgtcctgtcaataaaacgggatctggatgagctggacaaggatcatttacagttgagagaagcctgggatggcctcgatcaccagattaatgcatggaaaataaagctaaattatgtcttgcccccacccctccatcaaactgaagcttg

SEQ ID NO: 310 - DNA, 315 bp, Homo sapiens
atttgcaaattttggggctgcatgtgaggctgggaaggttgacccagagcttctaaagtacaaaatgaaatctctcacaacctgatggtatttggatagcatatacccaccagaggaacaggcttttatctagcataccacaggtctcccctttagcacatctgtgctcattttgaaactgtatagggaaggacattaggtggctgggagaactctgaaggacagacctggatctcctgccaccttccaaaggtgaaacaacaaaaatccgccaggctttcagtcagaagcccggaagggccactcccaaggaac

SEQ ID NO: 311 - DNA, 323 bp, Homo sapiens
aagttttggagaggggggggtctcactatgttgcccaggttggtcttgaactcctaggctgaagcgatcctcccaccttgacctcccaaagtgctgggattacagttgtgagccaccgcacccggcctagtctttaaatttagagcctcattgatataaagggcgaagaaaattaagtgttgtaaccaggtagcccggtgtccaggagaatgatggatctgtcagaaatccatgggtggtttcgagctttggtcccatcttggactcaatcgttcatggccagacgcctggcaaggagcccaaactacgccagaagtggacct

SEQ ID NO: 312 - DNA, 219 bp, Homo sapiens
tgggtacggctcgcaaaaaccacacaaggggtccggttggaaaacaccacccaaggggtccggtgggaaaacaccacataagggtgccggtggtaaaacaccacataaggggacgggtgggataacaccacagatggggacggctgctataatacgacagatgggcacggctgccataaaaccacataaggagaccgcctgttattagaccacataagg

SEQ ID NO: 313 - DNA, 160 bp, Homo sapiens
gttatctgaaattcaggcactgcatgcacaaatgaatggtaggaaaattactctgaatggagaacgagagagtgagaaaccaagccaagaactcttggaatataatatacagcagaagcaggctcaaatgctggagatgcaagtggagcttacaagtatg

SEQ ID NO: 314 - DNA, 308 bp, Homo sapiens
  misc_feature (1)...(308): n = A,T,C or G
ggaagttagtgcttaagggtaatagacttttttcttttcttttctttttgagacagagtcttgctcttttgcccaggctggagttcagngncgcaatctcggctcactgcagcctccgcttcccaggtgcaggcgatcctccttgctcctcacaggggaggctaggcaggataattcgttttccaggagccctctcttgggggaaacacctattttccccttaacatttgggggaacaaaaagggagttcccgttaaacattgttgcgtggggatgaggcgcccacattggctcccttaccctccgtg

SEQ ID NO: 315 - DNA, 310 bp, Homo sapiens
aaatgcctgcagggacccccggactagacagccctcagccttcatggggccggggggcagtgggcagctgctcttgaacaacaggcaattgttaccttgcaagaaagcaggctcagcgtgtcagacactcctgcttttcaagagaagctggaagttcaggaccagcctggccaacacggtgaaactcgatctctactaaaaatacaaaaattagcggggcgtggtggcgcatgcctgtaatcccagctacttgggaggctggggcaggagaatcgcttgaacctgggaggcagaagttgcagtgagccga

SEQ ID NO: 316 - DNA, 311 bp, Homo sapiens
ccttgctaactttatttcagaaagtggtaaaatagctatggagtacagacccagtgaagagattgtagatgtcagatgggaagaagaactacacggtttaatataagtatgtggagataaaaactcaaaggtaacagggccgggcacagtggctcacacctgtaatgccagtgctttgggaggctgaggcgggtggatcacctgaggtcaggagttcaagatcagactgaccaacatggagaaatggtggcacatgcctgtaatcccagctactcgggaggctgaggcaggagaatcgcttggacccggga

SEQ ID NO: 317 - DNA, 261 bp, Homo sapiens
agacaaaactattattcaactcaacagggggccttttttttctatacccccagccttgtaaaaaccctttggtgggtgggcccaccccccacttagatggttgggaaaaattggtttttttggaaacttgggggcgcccttggtttttttggaccccttaataggtggcgaaaaccggctaccccccgccgtgggtttcttttttatttccagggctcgggggggggggggggggtggatcacctgagatcaggagttcag

SEQ ID NO: 318 - DNA, 310 bp, Homo sapiens
ccaccatgactggcaaattttcgtattataagtagagatagggtttctccatgttggtcagactggtcttgaactcccgccctcaggtgatctgcccgcctctgcctcccaaaatgctgagattacagatgtgagccactgtgcccggctgcctgagacattttgggcaacagccgtgacagaagaaacgtgcatcccttctgtgcaggggatttaagaagtggctcatggctgattatgatttctttgctccgtttctggaactgcgggagcatcttctgggataagggtctatctgtttgagtctctg

SEQ ID NO: 319 - DNA, 307 bp, Homo sapiens
tgagcagaaaaggatagagtgtgacctgccaagagatactggacagtggcctccactttgtgtacccgggttggccattctccttatcggcacagtcaggataagaaaactctaagtttattcggatcccttggaggacacttctacatgggaacaattgcagctgtcatcttggactttacttcccagccaactcagtggggaaagaggggagcattctggggacctctgtagaggggcttcaacctggatagattcccaatcagagtgaagttcaacttcctccaggatatttcctccccctggg

SEQ ID NO: 320 - DNA, 303 bp, Homo sapiens
ggagcctttgactatgctgagcctcacagtattccaggaggggtatagtaagtaacagctggttctgggaccacttttgctcagagcattctgtggaatatgggtctccagaacattctctgagaactattactcaatctatttaaacacacaaatataactctgtataagagggaggacactggctggccgtggtggctcacacctgtaatcccagcactttgggaggctgaggtggacagatcacttcaggcctggagttggagaccagtctggccaactctgtctctactaaaaatacaa

SEQ ID NO: 321 - DNA, 295 bp, Homo sapiens
cattacgcccacactctgcaactaacagaaatatctcctctcccctgtatatgttaggaccaagaataaaatcaaacatgtggaggacatgtcagctagcctgggatttccaagataccccggttggtaagaactacttggggtgccctcatctggagattctggcttagtagatcagaggtgggcctgataatttatatccatgagcataccaggtaattcttataactaagcgagttttggaaaacacagggctcatctaggccagcaaaggtttcctgtcccagagtgggca

SEQ ID NO: 322 - DNA, 304 bp, Homo sapiens
tgatccatccactgaattctctcagagaaatgagaactcagagccataagcctgctaggaatttgcaagaatcttgggaagtgcttcataatcccccaggtgtagaatggaggttccaggcaatactctatggacttcaaaatacaggaagacctcagatgacacaggatacattccaaatttgcagaactggactcagtccattcagttgaattccaacagttttcaaatttgttaaagtacaaatattttgattcattgtattaaaaagtggttataggccaagcgcgggggtgcacactgg

SEQ ID NO: 323 - DNA, 321 bp, Homo sapiens
  misc_feature (1)...(321): n = A,T,C or G
tacggctgcaagnnnnnnnnnnnggggagcttgtccttctcatacttccactgggagaactcagggtccaattaaactccagaaccaggtgagctgcaccttctcaggtatcaaaacacagggcccgccaggcacggtggctcacacctgtaatcccgtaagtttgggaggccgaggcaggtggatcacctgaggtcaggagttcgagaccagcctggccaacatggtgaaaccgcttctctattaaaaatacaaaaaattggcctggcatggtggctcatgcctgtaatcccagcactttgggaggccgaggcgggcggt

SEQ ID NO: 324 - DNA, 286 bp, Homo sapiens
  misc_feature (1)...(286): n = A,T,C or G
tgaatattttgatcaatgaagtcatacacttaacaatagctatcaatattgaggagctataaataaattctaattttcacaaaactcagtaaggtatgtaatacaacctccgctttacaatgagaaaaataagtcttactgattcgttgatttaatccatatcagagttaataacctctttttcattaaaattggtcctttagaaacacacctgcagctgggcacggcggctcacacctgtaatcccagcactttgggaggccgagacgggcggatcacctgaggn

SEQ ID NO: 325 - DNA, 284 bp, Homo sapiens
tgagcttttcattacattgttgaaagatgaagaacgaaagctacttgttgatcagatgaggaagagatcccctagagtaaatctgtgcattaaacctgtaacttcattttatgatatcccaggttagctctctagtcggccagccaaaatgttggcatgttttgcccctctattcaaattaaccttgaaatatatttgaggattctctcttgttttaattaacacttgtgttggtaattaatagaaattcacctgtcttccgtatcagatttctgtataagcag

SEQ ID NO: 326 - DNA, 267 bp, Homo sapiens
tccaccactcccacacagcatgcacacacggttggacctgagtgctcctgatggaacccaggctgctctgtgccgctgtaggatatccccctgcttaaggactttcgtttcatctcagaccacatctggccccgcagttcctctgatagtttcccttctgtatcactgagcacatttggggcagctcgtccgtgagcatgcagtctgcacgtgtggggtgagggtggggcgcacacaggctgtgcctgtgctctggacttgtacaga

SEQ ID NO: 327 - DNA, 465 bp, Homo sapiens
  misc_feature (1)...(465): n = A,T,C or G
ccttactcagaaaccacacaagcttgcttgttgtgtttggtcgaancggcctaccgttgcgctaatacaacagaagggcatctctcttcatgaagggcacatacacacacacagttaaggtgctgaggaaactgggagagccaatttgacctggcctttattttgcacaagagtaactgaagcttcaaatacaatgtgtgttacataggaaccaattatgtatgtaggattaataaagataggagacctaaggccatttacatgagggcaagaatagtaaccttttgatccagagaggtagtttaaaaaatagtaaggtgttaacatatacaaataataaagttggggctttaaacatttgaatttgaaggctctgagtcatgggattaactttgtaccccagggcacagggaaaggctacccttgtgcataaggtattgaggaagcttcctggcagtaattccc

SEQ ID NO: 328 - DNA, 417 bp, Homo sapiens
ggcacgaggcaccttacagacagtggaggggtgtcccctcccacaggcaagaaccagaggcccaggctgcacacccatttcagccatcaagaacccacacagacggcagggaaggtggacacagtatgaactactgctgatgtctctgttggggatcagagggctggcgggaacgcgagaagggcaccagcagcattccacacccagctcttcctcaccttcctgtctagtttgaatttcttttttttctttttctttttttttttttaaattaaaaaaggaaaagggggggtggggaaaaaacctaaaacaaaaaatgggcattagggctcaaagcacccccaggaaggggcccatgtttggggggagcaggggcttgttgaccccacctgtttttgttttggcacaaaggtttgg

SEQ ID NO: 329 - DNA, 397 bp, Homo sapiens
  misc_feature (1)...(397): n = A,T,C or G
cgttgctgtcgcaagtttgaattgtgatgacggntgacgtttgctgatttttgactgtgcttgtagctgctccccgaactcgccgacttcctgtcggcggccggcactgtaggtgagcgcgagaggacggaggaaggaagcctgcagacagacgccttctccatcccaaggcgcgggcaggtgccgggacgctgggcctggcggcgttttcgtcgtgctcagcggtgggaggaggcggaagaaaccagagcctgggagattaacaggaaacttccaagatggaaactttgtctttccccagatataatgtagctgagattgtgattcatattcgcaataagatcttaacaggagctgatggtaaaaacctcaccaagaatgatctttatccaaatcc

SEQ ID NO: 330 - DNA, 394 bp, Homo sapiens
ggcacgagggacccatttctaggattctaagatgtaagatttcttaagttctttatcttagtctcatgcattctccacatcacgcgctgtaccatactgtgtagtcagaacagacagtgtgattgaaaagctttggaaaaagttaacacaaaggattatttagcacataggctgtagatacgtatgtgtgtatttgttcaacaattggagatggttgaatacccttgaacaaagtgtgtatcttctcaaatcagtggttgcactagtcaataattagaaggtgttgttatttttaaaactataagcaaaattatgaaggcctttaaaaaatctatcataataatgaaaaagaggttgtctcccaacagtgctgtccctcaaagaaaagactggt

SEQ ID NO: 331 - DNA, 377 bp, Homo sapiens
attatgggcgtgagccaccatgcccggactctacatcagaaatttcaaaaggaatttcatagttacaagttcttcatgagaacaatagctcccagaaaacaccttccttggttccaggtttacactgaagtttttcttttttttttatttcacaacacagattctaggatacactgaagtattaagaaaaatcggggccaggtgcgggggctcacgcctgtaatcccagcactttgggaggcctaggtgggcagatcacctgaggtcaggagttcgagaccagcctgaccaacatggagaaaccccgtctctactaaaaatacaaaaaaaaattatccaggcgggggggcgcatgcctgtaatcccagggactcggg

SEQ ID NO: 332 - DNA, 401 bp, Homo sapiens
ggcacgagccgagctcggaggcggtcgtgcggcgcggagtcctcctggatcgtggcaatgggcagacacagagcagaaagtggcggacttgggcggccacaggtaactttctcgcaaggagctgaattctttcactaaagggtacaagcccgagggacgagctgcgcgatgattggctggggagctccctcaggtgagctgccattggcagaggcgcgctcaggtaaggcccttctccaagtgcaggtaactcactccgaagtttacctgagtggagcggcggcatgcttgcagctcggcggcagcctgtgagagctgagggtcagttcttcgagtagatctcaagctgcgttttcctccttctccaaagcagggatgggaaggtggaggctactggttgg

SEQ ID NO: 333 - DNA, 392 bp, Homo sapiens
  misc_feature (1)...(392): n = A,T,C or G
cgttgctgtcggctcaacaagcatcctagttaaagggcttatcttcatgagtaggtgacaccacagacatggtgcttacttcagaattagctctattattttcagaacattgcttaacatgttggttgagtccggcagacaaattaacatattcttgtgcataaaaattagaacaaatttggtatggccagtggaaactatggagtccaattgctttttaatctaattttgatttaagtaaatgcagttatacagaggttgcaaggaacagaattgtttttattttattctattaagtcatggtataacatgtatttaaaagattatctgtcttaccaaatgtacaatttttgtacaattattggccttggaagtagagatgacagaattcn

SEQ ID NO: 334 - DNA, 383 bp, Homo sapiens
cggctacctgctgacaggattgcctgatgtcaacgtatctgtcttgctaaatgtccttacattgacagctcttatattgttcataccatccattacataaatatccaccatcctattatttggtattaaaactcttcctcaataagaactactttcctggagcatttctgtgtgcctctcctggtcatactaagtgcatgtagctttctgcttacgagggtgagcatttcctatccctgctgctgtcttcacagcacttaccccacagaaagatctcaggcactgacaagatatccaatctcaatgctatgttgtatcaagcctcatatattgataaaaaagtcttagtggcattaattctaaataaattactattccacacg

SEQ ID NO: 335 - DNA, 404 bp, Homo sapiens
cttctccatgctcggaataacttcctgcatcgttcaacaggctaaagagggggaaggtctggaggttggaaagaggactggaatctgattggggttccaacaaatctgtaacaccgctgggaacgactgggtcccctttaggtcctttaggacagcgtttgaaatcttgctttcccctgcagggatccagcaccggctcctcctccggcaaccacggtgggagcggcggaggaaatggacataaacccgggtgtgaaaagccagggaatgaagcccgcgggagcggggaatctgggattcagaactctgagacgtctcctgggatgtttaactttgacactttctggaagaattttaaatccaagcctgggtttcatcaactgggatgccataaaccaggacct

SEQ ID NO: 336 - DNA, 390 bp, Homo sapiens
ggcaccagcaaagaggaaacagtttagttttagtggcatgtcctcagtgcaatgctgaatacctaatagtttttccaaaattgggtccagtggtttacgtcttggatcttgcagatagactgatctcaaaagcctgtccatttgctgcagcaggaataatggtcggctctatctattggacagctgtgacttatggagcagtgacagtgatgcaggttgtaggtcataaagaaggtctggatgttatggagagagctgatcctttattccttttaattggacttcctactattcctgtcatgctgatattacgcaagatgattcgctgggaggactatgtgcttagactgtggcgcaaatactcgaataaactacaaattttaaatagcg

SEQ ID NO: 337 - DNA, 400 bp, Homo sapiens
cgttgctgtcgcttgggaagaatcccaacatcgagaaaacggtgtcctgtgagttccaacaatgcttcttgttcatgggtttcttccgtatggagtggattaagagtgttttattttgttgttctaactgagaaaaaaaggaggcacccacaaggttgaggtcacacagtctccacagtttccaggaggcgtttgggggtggggaaggcacctccagagcatgaggctctaaggggacatgagtaaagcatgtctgtgacccagtgaggaagggagaggccagctgcactcctgcacggggttcctagctgcagaagggtcccgcctatgccgaggggaaacacctgatagcagaagaggcctggatgcacacctggcacgccgaggctctccgcccaga

SEQ ID NO: 338 - DNA, 356 bp, Homo sapiens
cctcagcctgctgagtagctgggattacaggtgcccaccaccacgcccagctaatttttgcatttgtagtagagatggggcttcaccatcctggcccggctggtctcaaactcctgacctaaggcgatctgcccgcctcagcctccctgagagctgggattaaaggcgtgagccaccacacctgggcaccttatttttttatacggctctactgcatacagttgaataagaaaactattcctgtattgctgcactttcacactgcttcaaaatcggcctaggagaaacaatgctttaattgcttcgggtgcatttaattcctagagccaacgggcttggccaaaggcaacctaccc

SEQ ID NO: 339 - DNA, 351 bp, Homo sapiens
  misc_feature (1)...(351): n = A,T,C or G
caaactcccaagcacaagtgaatcatgggtcagtgactcattgtgtgaataggggcacagagaatccctaaaccattgcttttcatatcaggagtccaacagtctttcaggttgcccctgactgagggctttgagtatttagtggagttttctggtaaatcatagctattctaatttaggtttcagcccaactagatgcttcctactatccctggtaaggaatggaactggctcacagtaaatgtagctgtttagtaatagatgcagatattcttattatcctctctagggcttctattctgatttcttatttttaagattaagaatttaatggctaaaaaagctaagtgn

SEQ ID NO: 340 - DNA, 381 bp, Homo sapiens
cgttgctgtcgaacaatgttacaaaaggcaaatataaagagtatgttttctttttagtgctttggaaaaatttcacttaaactcttattactgtatagattaagccctataatgctatttatattccaggggaacgaaaatctgaatttgttttatgatttaaagcatctggtttgcatattgtattgtaatactgatacagtttggctgtgtccccaccaaattgaattgtgttaatagttcccataatccctacgtgttgtgggagggacccagtgggcagtaatttaatcatggtggtggttaccctcatgctgttcttgtgatggtgagttctcatgagatctgatgggggtttttttttgttttggtttttggttt

SEQ ID NO: 341 - DNA, 344 bp, Homo sapiens
  misc_feature (1)...(344): n = A,T,C or G
ggtccagtatgtagcgtaacagccttccaaccagttagagccagtgctctggttggccattcttgctttattgcctaccctggagttagattagcgggtgaggggagatcacttttatctagactgcaggaactgagaatgggtgaggggtgattcccaaatagaaaatgaaggttctgtttatagaagaataagaaactatgtttgtctggtaaaaatagcagttgtccattctatcagttttcattcccatgttacagaaattcttaccaaacaggcttaaatagtaagcgaatgccttagttcatttcactggcagttcagagtggggggagccctggggn

SEQ ID NO: 342 - DNA, 374 bp, Homo sapiens
cggtgctgtcggaacttttcaacatattgacacccagcgtgtattacaaacgaaacagggacagatgaaggcctgcatttgcctgaacgctatagtttgttgatccctaactagtaaatggaattcacatataaccacatggactttgcactgcacagaaaaagtcagtttggggagaatttcagacttacatgtgaaggacagatgtcaattttcatttttattttatttttgagacagagtctccctctgtggcccaggctggagtgcagaggcatgatcttggctcactgcaacctctgccccctgggttcaaacaattcttgtgtctcaacctcctgaaaagctgggaataacggcgggcacccaccacg

SEQ ID NO: 343 - DNA, 373 bp, Homo sapiens
cgttgctgtcggaattgaagcccaggtgggtgtccaatgccagaccatggatcatcagcctgggacaccaaagtgccacactctcagagtgaggatgatcctcaggaagtcagctctaccaccctccacaccaggaagtgcaagcagactcacctcatgattgagcagaataagagaatccttgagaagtcataagtttgcatggatttgcagcacaagttcaaacaactagatggcaccaaatccctcaatttatgaagacatttaacgtggtacccaattggaaacgcctcatggcagaaacaaacataaatcctttctagaaggttgccttgtccaagtgtttcccaaaccagtttttttagggaaaatg

SEQ ID NO: 344 - DNA, 350 bp, Homo sapiens
  misc_feature (1)...(350): n = A,T,C or G
aagctcctgtccccgaacaagaagcagaggaaaaaccacactagcaagctgcaagagttggcactgctgctgcccatagccctgaagacggggaccaagaagctcacaaaggtacagggactagaggagaggggccagatttgggacgcaggtctttaaatagcagcaaatgggtcaccctctcctgggaaacctggacagatcctttcagtggcagcattcaaatgggaatggtgctactctgaacgggaatttccgggagtctgtgatcccataactaggtgcctggaggatcctttttttgcaaaggagagaggagaaaccgggctggggaaatagagatagcacan

SEQ ID NO: 345 - DNA, 361 bp, Homo sapiens
  misc_feature (1)...(361): n = A,T,C or G
cgtgtctgagctgtgatgacgctggccttgtgtttcgtcaggtggtgtccacaggtgccctgctggttgctttttctctgccctgggagaggctcgctgaggctgcacggctgcctgggagaggctcgctgaggctgcacggctgcctgggcggcctctgacgcgccctgtggactgcagcatccaggggatcgcgtctgcaactcttattgctttggcgtttacctattggggatttaaaaaaaaaattgttcatttttataaaaaagacatgggctggctgggcacggnggctcacgcctggaatcccaatactttgggaggctgaggtgggcggatcacctgaggtaaggatttcaag

SEQ ID NO: 346 - DNA, 223 bp, Homo sapiens
ggaggtggaggttgcagtgagctgagatcatgccactgcactccagcatgggtgacagagactccggctcataataaaaaaaaaaaaaaaaataattttttgactgaaaaaatatttttttgtgtgggggaggggtttttttttgggcgcaagaagtaacaacctgtgttgggggggggttgcccacccccttctttttggagagcttgtgttcttttttttt

SEQ ID NO: 347 - DNA, 477 bp, Homo sapiens
ttgttctttttgcaagatcccactcgattcaattcggcacgagatattaaaaggaggttagtgcttaacaagaatttaattgctctgcaattcatgctgtttctaaacaaacctaaactttaagatctttctaggggcagaaagcccatgagaaatacaatggaaggtaaagacaatgggacggcggaagtggttgcaccccgtgcaaccagctgcagaatgaatagggaaaacagcaaagctgtactagcctctggtttatcaactccagaccatgagaaagataactgtagatacagttacactatgacaaggctaagcacgaatcaccaacatgtttcccaaagtgggtggtggccctgaaagtgtgtttgcttgttagatggaatcaagagctaaaatcaaaggctactcctgaaccgttttagtaagacccgaggtaggagttcaaaagcctcagtctcagttcccccgtat

SEQ ID NO: 348 - DNA, 321 bp, Homo sapiens
ggagtagaatgcttttcactagctctcaaaccttggtgtgaggaattccttggagggcttgttttaagcacagattgctgggcctactggaatcagtggttctgcaaggaggccctaaattcgcctccctgacaggttcctggcagatgtgatgctgcctgaggcctgcacttaggaccactgacatagccaactagaagaaacatgggaaggctggggagtctctccctgtagtgagccctcaggaggaggattagaatgggggcactggaggaccaggcgcggtggctcacgcctataatcccagcactttgggaggcg

SEQ ID NO: 349 - DNA, 434 bp, Homo sapiens
  misc_feature (1)...(434): n = A,T,C or G
cacagcacttgtcttttggcggatnnnntngagtcgaattcggcacgagatgccgtggtggagaacacacctgtggctatcttatgtgaggactagaggtgaagaggagatggacactgcctctggagccagcctgacaccaaggacagcacttgtcatcatccctatcctcgtcagccccaccctgctgcctcagctggacccagggctttgacacaaacccagtgctttgcttatgggtgctcgctggggtccggtggagactgaccaccctgcttgagccaaagacaaggtgatgagagatggggagaggccattggctcccagagggaacagtgctggctgtggctagagaacagcaggtctgtgcagtgtctgagggcaggttgggaagggtagcanagagagagagaccgaaagagagagagagagac

SEQ ID NO: 350 - DNA, 178 bp, Homo sapiens
  misc_feature (1)...(178): n = A,T,C or G
acgtttagccctgaacaggagccaccatgcattgcttcagcttcattaagaccatgatgatcctcttcaatttgctcatctttctgtgtggngcagccctgttggcagtgggcatctgggtgtcaatcgatggggcatcctttctgaagatcttcgggccactgtcgtccagtgccat

SEQ ID NO: 351 - DNA, 442 bp, Homo sapiens
  misc_feature (1)...(442): n = A,T,C or G
tagcttttttgatgatcccatcgattcgccgatttaaggctgcaaggaaggagtcctgttattttgttttttcctgagcaaagccgttttcttcagagctgcggcagaaacggttgaagacgctggactgcgggcagggggcagtgcgagccgtacgatttaatgtggatggcaattactgcctgacgtgcggcagtgacaagacgctgaatctgtggaacccgcttcgggggacgctgctgcggacgtacagcggccacggctacgaggtgctggatgcggccggctcctttgacaacagtagtctctgctccggcggcggggacaaggcggnggttctgtgggatgtggcatcagggcaggtcgtgcgcaaattccggggccacgcagggaaggtgaacacggtgcagtttaatgaagaggccacaggtattctgtcccg

SEQ ID NO: 352 - DNA, 413 bp, Homo sapiens
cgttgctgtcggtccctttccatcctcttctccctgcttccctcccagcctctggcaaccactattgtcttttatacttccatgagatcagcttttaaattccataaatgagtgagataatgtgatacttgtctttctgtgtatagcttatttcacttcacataagtccttcaagttcatccatgttggactaaataacagaatttctttttttttttaaggacaaaaaatatccgaaacaaagccaaccaatccatgacccaaagttggtgctattatatttccattgagaggggattatctcaaagtctaggttaagtccttgttccaaattaaaatctgaaattggaaggggtggataacaactagaaatatagtggaaaagaagctcctaatatggactccattcatgg

SEQ ID NO: 353 - DNA, 167 bp, Homo sapiens
aaagcacatttcacttatatgtccagtatccccaatatctatgactttaaaagtcctgcagaacaaaggctattaccgagtgctcagtgcctgttcttgagatgcttcacattgtggcagtctcagaaataaacgttttttaactgagagcttttgtttaccatgag

SEQ ID NO: 354 - DNA, 238 bp, Homo sapiens
gatcatacaatctagtagcctgttagaatatggagtatgacagacagattctggaagtcacattattagtatcaacctttagtgtttgtttttatagacactgacctacatataaataagattgtgaaatttgaaagaagtacaaaaacataacccataatcaaaagagaataagatcaatagaagaatattttgaaataatcaaaccaaacatttaaaataactatgcaaaatatta

SEQ ID NO: 355 - DNA, 374 bp, Homo sapiens
tgtcgcgcaagctggagtgcagtggcatgatctcagctcactgcaacctccacttcccaggttcaagccattctcctgcctcggcctcccaagtagctggaattacaggcatcctgccaccacatctggctaatttttgtatttttaatagagatggggcgtcaacatctagaccaagggtgctcttgatcatcggaaatactgtgagccgtcgacaatgtgctcccagtgtgatgctattattttataaatccaaggctaagtataataattaggcttagaacacaataacacctctggccaaagtatcgtaaccccccactttactaataatctcctcagtttacagatgagccggtcctaatatccggttc

SEQ ID NO: 356 - DNA, 131 bp, Homo sapiens
ttcggctgtgaaatgacaacagatggtgtcgggtgcgatatgacgaccgaatggttaccgctgctataacacgaccctaagtggatcgggttgcgggaaattcgactgcacagggggctggcgtttgactg

SEQ ID NO: 357 - DNA, 226 bp, Homo sapiens
aaatacattttattttgttaacatttaagaaatctagttgcttcatgttgataatcaaataaataaacctaccaattagggctttaacatttgttatggaacatggtacacattcccattgaggtttaattgttaaggtttgtttgacacattttaagtgtttagactgaaatcttcacggtttggaaatcattgtacttctagcactggcagaagacatgtaaat

SEQ ID NO: 358 - DNA, 414 bp, Homo sapiens
cgttgctgtcgaatcagctaagggattgtaatttttaattcttttgaaaaataaatattgtatttaaaagacgttatttcacagaagctaacaaagagaccttagataacatttgtttggttagccacacggttgagcacaaaacaatgtgtagatgtgttgaagattagggcaggaggctcaacttctcggtgacctttttttgcttcacaacaagccaattatagttgaatcattttctctcttagctagttgttactacaaactttataagaaaaacaactagacaccttctagttttaattaataccaactcctttagagttagagactttttaaaaagaatcattaagcatattttctttttttttttttaaaaattaacactctttaggccttctatttttccgtgtt

SEQ ID NO: 359 - DNA, 406 bp, Homo sapiens
cgttgctgtcgaatcagctaagggattgtaatttttaattcttttgaaaaataaatattgtatttaaaagacgttatttcacagaagctaacaaagagaccttagataacatttgtttggttagccacacggttgagcacaaaacaatgtgtagatgtgttgaagattagggcaggaggctcaacttctcggtgacctttttttgcttcacaacaagccaattatagttgaatcattttctctcttagctagttgttactacaaactttataagaaaaacaactagacaccttctagttttaattaataccaactcctttagagttagagactttttaaaaagaatcattaagcatattttctttttttttttttaaaaattaacactctttaggccttcaatttt

SEQ ID NO: 360 - DNA, 400 bp, Homo sapiens
  misc_feature (1)...(400): n = A,T,C or G
cgttgctgtcgctgaaataccatcagaggcccaggaggggctagttgtaactggcaaatatagtaaattaatttgctctggttgataggtagcaagcagggtttatatacattgtcacctacttttccagttaacaggagagactggagattttatgaaatttgatatttaaatgttggtaactgggttgggcaccatggctcacacctctaatcccagcacttcgggaggctgaggcgggtggagcacctgaggtcaggagttaaagaccatcctgaccagcctggtgaaacacagtctctaataaagatacaaaaattaggccgggtgtggtggctcatgcctgtaatcccagcactttggggaggccaaggtgggcggatcacctgagtcaggagtn

SEQ ID NO: 361 - DNA, 409 bp, Homo sapiens
cgttgctgtcgcaaggatctccattctccctgtctggatacttctttggcagagatatgtcctttaggaaaaaatctcagctctaaagttaattcagacagcggtattccaggactagcagccagtgccttacttgtgagtcacggtgcttacatcagaagcctgtttgactattttctgactgaccttatgtgtgccttaccagccactctgagcatatatgaacgtatgtcagttactcccaatacagggatgagtctctctatcatacactttcgtgacggaatgagaagttaaaccaacggttcagtgtattcgtatgaacctacaggatcatcgaaatggactgactgatactcgctgcggataaatctgcatcactatctaaccattttgagcctctgaaggg

SEQ ID NO: 362 - DNA, 386 bp, Homo sapiens
  misc_feature (1)...(386): n = A,T,C or G
atttcagatggatagtagttcaggtacattactggtacagtgtgctcaaacgttttccccatgattactaggttcttgtgatatctggtctagaaacacagccatcatttataaatctgtgtgtgtgtgtgtgtgtgtgtgtgtgtgtgtgtgtgtttcttttaatgggagaatgtgatcagagttctaaaaaactgaaataaaagtgcgtttttagaatatgacttattttgtaaattttagatagattatagagtgactactataccctttttcagagcagaggaagagaacccatttaggcatccgtttaaaggagatttggtgtgatgttcttagggtcttttatctgaaagatgaactgcggctctgtctattatagatan

SEQ ID NO: 363 - DNA, 406 bp, Homo sapiens
cgttgctgtcgcagggttttgctttgtctcccaggctggagtgcagtgatacaatcatagctaactgcaacctccgcctcctgggctcaagcaatcctcccacctcagcctccccagtagctgggatcacaggcatgtgtgaacatgcctggctaagttttcatatttttttgtagagaaggggtttcgtcatgttgcccaggctggactcgaactcctgggctgaagagacctgcctacctctgcctcccaaagtgctgggattacaggcatgagccacccagagccaaggtctcagtcttttagtgagcttgtttatggattttgaactatatcctgtttctcagcgcctcacccccaggatggcttgaatgacctgtagttgggtatttcccttacctcatgt

SEQ ID NO: 364 - DNA, 376 bp, Homo sapiens
  misc_feature (1)...(376): n = A,T,C or G
gtgctgcatgtttaaagtattccctctgttttacttcatgatagttggcccctttcaggttataacacggacatttttctatggttttcattatttgcacatgccaacagagtagaatagatttttaacgagcatcacttcattgcaagcaaatttattaatccagtggtactgatgaaactaaggagctctttggggtcaggctcgatggctcacgcctgtaattcttgcactttgggaggctgaggcgggtggatcacaaggtcaggagttcaagaccagcctggccaagatggtgaaaccctgtctttactaaaaatacaaaaaaattagccgggcatggtggcgggtgcctgtaatctcagctactcgggan

SEQ ID NO: 365 - DNA, 140 bp, Homo sapiens
tactgctgcgagatgacgacacatgggtacggttggtagattacgactgaatggtactgttgcgtatcttacaccttaatggctcgtgctgtggtgaatactactctacagggaacctgttggcgtatattcctcagatg

SEQ ID NO: 366 - DNA, 137 bp, Homo sapiens
tgggtacggttgctataagacgacaaattggttcggttgtgtttagatgacagatgggttcgtgttggctattaatctcaccaatgttttcttgttgttttatactgacgtaatgatcattttttcggttatctgcg

SEQ ID NO: 367 - DNA, 398 bp, Homo sapiens
  misc_feature (1)...(398): n = A,T,C or G
cgttgctgtcggggagatcggaagattttttctctatctggactctgctggtgtgcctgttgactggcactgggggaaagtcgtctgaaactggggcctcagtttcttaaggaggttggtttgaatcacaatcttcaaatatagggggatctgagggtacaaaaagggtctgtgcacctcctgaaatagtatataccattgtgtgtgtgagcaaaaatgtattccaacccttcccacgcccgctcgaggtccacagtttccatcagattatcagtaaataggataccaaatgtagtgaaaagttaccattacatgccaggcgcggtggctcacgcctataatcccagcactttgggatactgagggcggcagatcacttgaggtcaggagatcaaaan

SEQ ID NO: 368 - DNA, 209 bp, Homo sapiens
aaatacattttattttgttaacatttaagaaatctagttgcttcatgttgataatcagataaataaacctaccaattagggctttaacatttgttatggaacatggtacacattcccattgaggtttaattgttaaggtttgtttgacacattttaagtggttagactgaaatcttcacggtttggaaatcattgtacttctagcactg

SEQ ID NO: 369 - DNA, 405 bp, Homo sapiens
tgactatgttttatctacactaaaacccttgcagttcccaatctgctcgttgtagtttaaaactttcacgcttcgttaatgtcactgcctctgtcatctttgaaaagacgatagttttgtgcctgctgaacatatatgaaatgcatgcaaaaagagtttgttgaaactctttgttacgacttgctcttcccgcttcacattctacctggcctctaatttaatattaattggtttggaaatcagagtcaacaaaaagacccacaagacttaatggggtcccatcagtcatcataatttgatttgaaaggctgaaagcgggcagcactgtcattcatagccaaacagtcctattgagaggtcttggactatcatgccagctgtcagaccactccatgcactgggtgg

SEQ ID NO: 370 - DNA, 398 bp, Homo sapiens
cgttgctgtcggttcaggtcactgaaagcaaggaaagcctgataaactgccacggccacgaggagtctaaggacacatccaatttccattcgcatccaaaatggaatccgagacagaaagaggaccttagccttcatatctgtttttttcttatgaagcttcttctggttggaaacttgtcaaatttcatcaggtaagaagtgctaaagtgaacctgtaaactttgtttcaaaaaacaaaaaccgaagtttaagaaatctaaagatggtgtcagccttagacagatctctggactgtaatctgggaaaggtcaaataagatctccaatcgtgtacaattccaaatacatttgagagcagtgggtctgaaaatgtggttcccagaccagcagcatcaat

SEQ ID NO: 371 - DNA, 325 bp, Homo sapiens
  misc_feature (1)...(325): n = A,T,C or G
gagtgtgactcttaaaggcaagagcatgtatattatgccaaagcagcctgaaatattttattcacagacagacagacaatgcttgactccctgctaatctgaaatacttcgtggggagggccagggaaatcacaacaaaatttcagaagtagaatgagctatttggtgtatgtctcccaggccaataaataacacgaaggaagaataaatttctttgctaaccacacgaaggagaaatacacttttttgctctaaaatattttccaattatctccacgacactggagggaaggactatcancnngtacatnaatgtgaggaaggg

SEQ ID NO: 372 - DNA, 405 bp, Homo sapiens
cgttgctgtcgcatggagtcttgttttgatgatgacagttttctgtaactacagcttggaaactatgcaaatggtctagattcctcatagctcacatgataggatataggtagtgatgacattttgctcttcttgtgggaacacacacttcaaggaggagatagtgactttgagataggaacagtttaagatgcagtgtgagtctggcctgcgtgcggtgaggaggccccgccaagagactggtggacatctgactgtgggatgtgctctcaagtaggacgtcatcaggacagattctgaataggcatcatgagagtgctggtcagaaacggctgccactttttttaatttaattttattttttatttaaaggaaggaaacatagctaggtaagatttttatcac

SEQ ID NO: 373 - DNA, 403 bp, Homo sapiens
catcgattcgaattccgttgctgtcgcttagtcttcatactgttttaaatgcttatttacttatccttattccccatttaggctctaagcactaagtgggtactgcaagtgctcaaaaattttggttgctagaaatagtagtgttaagtcaatgagaaatggtcttaaaatatagacccagggcagatcttttcccacctcagtacaatgagctgtcatgtgccttacttgactgggaatctatcacaaatacatgtgcagacatttctagtttagataacattaaaaaaacatttagcgaacagtatgtattctgctccctccttatacatcttgcagtacattaaggatttccagttttcctttccctcaaacagttgcagaaagtcagtataagagtgtt

SEQ ID NO: 374 - DNA, 371 bp, Homo sapiens
gagatttgttacgtattttagacatcttctaagtaactccacagaagactctcaaaacaaaagcgtgacctcaacctgcctataggtgccctagtggagaatgcttgataccaggtgacaacccccacgcgccccaatagtgcaagaacaaagtggaggccagagaaggggctggtagtttcttcttagttctcagaaggcttatctgatgatccactcacctctccttccaccttaagggaagaatggaagataataagcaaaacttctagaaagagcaattagcccttcaacttctaatatccaggtgggtcagttcccagtgagagaggtaagtgggcaatggtaagctgtgccacacaccaagtatg

SEQ ID NO: 375 - DNA, 420 bp, Homo sapiens
  misc_feature (1)...(420): n = A,T,C or G
tgagtgtggggccctgcgtgacagccctgcccctgagtatctaatgtgtgcgttgacagccctgcccctgagtatctaatgtgtgcgtgacagccctgcccctgagtatctaatgtgactggctgttgtctcccgggatatcttccaagagacagaataacctggatctgaggataaatgccaggaggaagggagaatgtatccatggttcccatctccattagtcaaaggtacctctacagtgccttcacagcccaggcctgactgcgcctagcggctcctcagcgtttcaggctcagcagcagcagggacaccacaagtggccaggtacagcctggaacccctcccagggctggccctagaggcaggtaaagtgaggagcaccttacatggtgcataanaagtgtccaatgccagtgc

SEQ ID NO: 376 - DNA, 417 bp, Homo sapiens
ggcacgggaggtttcagcgagctgagatcacaccactgcactccagccttggtgacagagtgagactctgtctcaaaaaaaaaaaaaaaaaaaaagccccccccctttattattataagggggccttttgggataagcccaaacccaaaaaaaatccgggggggggggcaccccccccctgggaattttttaaaaaaaaatgtttttttcggacccttgggggggggcccccttttttggtcaccgttaataggggggaaaaaaggtgttaattacaaaaagggactttttttttttttggggccttgggggaggggggggggagtttattcatgtcccctttttcttcccagaagaggaatatttcccccgctcagaaagggaatcctgcgcccttttatgccctggggggttttg

SEQ ID NO: 377 - DNA, 375 bp, Homo sapiens
gatttgtggtgagattctctcccaggccacaagacatttcctgctcggaaccttgtttactaattgtaagtactttacaagtaagaacttgttttaaaaacttagcattcaaaaaaaaaaagctttttttaaaagaaattggattttcttgtttttttcttagcaggttatattttgagtttcagctaaaagactaaggttttcttatctaatggctttaaatttatacatttaggcaaattcaacaattttttgctaagcattttgccaaatgccaggcttttcaaagaagggtaagatcccacccttgaatcctcatcaattgctgctttttgcagaaaacacatattatacattgtatttagaaacatgaag

SEQ ID NO: 378 - DNA, 164 bp, Homo sapiens
agtaaaaacaaaatcaagactaagagaggaggaattagaatgagactcatgtaccctccttccccactccaggggaaggagagactgtttgggaatgccctcccactacttccagggcagaggctgtgcagaagagccttggagaatctgcagcccactgatgg

SEQ ID NO: 379 - DNA, 239 bp, Homo sapiens
atgccctctccccatgaagaatcactctgaattcttcaccactgatgctttccatccggaggtgaaacggcccagacaccctgtcccctcccctctctcactcctcttacaggcacagtgcggccctcgcatgaactccccgtcgacccctgccccctgcctgatctctatcccacgctcctctctgcgtcttctgcctacctaccgcccttccttctcaatccgccgcgcgcttcccc

SEQ ID NO: 380 - DNA, 406 bp, Homo sapiens
gaaggaatgtgggcaaggttttgaacttgattgttcttgaagctatcagaccacatcgaggctcagcagtcatccgtgggcatttggtttcaacaaagaaacctaacatcctactctggaaactgatctcggagttaaggcgaattgttcaagaacacaaactacatcgcactcgtcagttgtcagttctggggcatgactttagcgttttgtttctgcgagaacataacgatcactcatttttatgtcccacgtgtgtgtgtccgcatctttctggtcaacattgttttaactagtcactcattagcgttttcaatagggctcttaagtccagtagattacgggtagtcagttgacgaagatctggtttacaagaactaattaaatgtttcattgcatttttgag

SEQ ID NO: 381 - DNA, 406 bp, Homo sapiens
  misc_feature (1)...(406): n = A,T,C or G
cgttgctgtcgcttgggcaaaagttcagttaatagtgctgttctgaaagatagggttaataaacaatttgttggagaaacacaaagcaggactttcccagtaaaatcacagcaactctctagaggagcagatcttgcaagaccaggagtaaaaccctcaaggacggttccctctcactttattcggacccttagtaaagttcagtcatcaaagaaaccagtagtcaagaacatcaaagatataaaggttaataggagtcaatatgaaagaccagatgaaactaagatacggtcataccctgttactgaacagagagtgaagcacaccanacccagaacataccccagtttgcttcagggtgaatataacaacagacatccaaacatcaagcaagatcagaagtccn

SEQ ID NO: 382 - DNA, 186 bp, Homo sapiens
caacgcgtctctgttctggctacataggggggcgctttttttttttttccccacatggtttactgctctttttgtgtagttggttaaaacccctgttctttgttgggtctggataaggacgccctctctgtttggatgcttgtggcgctctacggcgggtttgttttggcgagcccttttatatgg

SEQ ID NO: 383 - DNA, 411 bp, Homo sapiens
  misc_feature (1)...(411): n = A,T,C or G
cgttgctgtcggaattgaagcccaggtgggtgtccaatgccagaccatggatcatcagcctgggacaccaaagtgccacactctcagagtgaggatgatcctcaggaagtcagctctaccaccctccacaccaggaagtgcaagcagactcacctcatgattgagcagaataagagaatccttgagaagtcataagtttgcatggatttgcagcacaagttcaaacaactagatggcaccaaatccctcaatttatgaagacatttaacgtggtacccaattggaaacgcctcatggcagaaacaaacataaatcctttctagaaggttgccttgtccaagtgtttcccaaaccagtttttttagggaaaatgcacagcttactataaaaaaattttaacctaaacttggn

SEQ ID NO: 384 - DNA, 354 bp, Homo sapiens
ctgggaatacaactgttccagcaaaagggcccctgtcttgggaaggcccacgctgaggaggggaggatggcccgaccttaggggacatagtcagagactatgctttcaagcctccatggcctcccttgcacggcagagaagagggtatagaaagtatggacagggagcccagtggagacggagctggccagccaggaaggacctatgtattctgggcaggaaggtgagaagggctccctactccaggcctgcccaggccgtctcctgctccaagctccgctagctgccccgggctacgctagctgccctgttgcccgcaccaccacgttccctggcgcctgcgggagggaaacg

SEQ ID NO: 385 - DNA, 381 bp, Homo sapiens
tgcctcagcctctcgagtagttgagactacaggtgcccatcaccatgcgtggctaatttttgtatttttaatagagacggggttttaccatactggccaggttggtcttgaactcctgaccttgtggcctgcctgcctcggcctcccaaagtgttgggattacaggcgtgagccaccatgcctggactaagagtgtgtgtgtgagtatgactttctcaattcgcgtctcccctccccttccttattgcgtcatcagggtagtctttccgtaagacacgtcgcaatcaaggcggtcgagtcctagacatcctttcttccttagggcgtccagctcattgcattaacacgactatctgttttttatctacggtgcgtagaccg

SEQ ID NO: 386 - DNA, 398 bp, Homo sapiens
ggcacgagacaaaatgggttcaccaggcttgtttacaacgctgggtggatgaaaagcaaagaggaaacagtacagccagagtggcatgtcctcagtgcaatgctgaatacctaatagtttttccaaaattgggtccagtggtttacgtcttggatcttgcagatagactgatctcaaaagcctgtccatttgctgcagcaggaataatggtcggctctatctattggacagctgtgacttatggagcagtgacagtgatgcaggttgtaggtcataaagaaggtctggatgttatggagagagctgatcctttattccttttaattggacttcctactattcctgtcatgctgatattaggcaagatgattccctgggaggacttatgtgcttagact

SEQ ID NO: 387 - DNA, 383 bp, Homo sapiens
gatttgtggtgagattctctcccaggccacaagacatttcctgctcggaaccttgtttactaattgtaagtactttacaagtaagaacttgttttaaaaacttagcattcaaaaaaaaaaagctttttttaaaagtaattggattttctggtttttttcttaccaggttatattttgagtttcagctaaaaaactaaggttttcttatctaatggctttaaatttatacattaagccaaattcaccattttcttgttaagcattttgccaaatgccaggcttttcaaagtagggaaagatcccagccttgaatcctcatcaattgctgctttttgcagcaaacacatattatacattgtatttaggaacagggatcattaatg

SEQ ID NO: 388 - DNA, 405 bp, Homo sapiens
  misc_feature (1)...(405): n = A,T,C or G
cgttgctgtcggttttatctacactataacccttgcagttcccaatctggtcgatgaagtgtaaaactttcacgcttcgatgatgtcactgcctctgacatctttgaaaagacgatagttgtgtgcctgctgaacatatatgaaatgcatgcaaaaagagtttgttgaaactctttgttacaacttgctctttccgcttcacattctacctggcctctaatttaatattaattgttttggaaatcagagacaccaaaaagacccacaagacttaatggggtcccatcagtcatcataatttgatttgaaaggctgaaagcgggcaccactgtcattcatatccaaacagtactattgacaggaaatggactattaggaccagctggcaaaccactccctgcactn

SEQ ID NO: 389 - DNA, 405 bp, Homo sapiens
cgttgctgtcggaggaaggaagcctgcagacagacgccttctccatcccaaggcgcgggcaggtgccgggacgctgggcctggcggtgttttcgtcgtgctcagcggtgggaggaggcggaagaaaccagagcctgggagattaacaggaaacttccaagatggaaactttgtctttccccagatataatgtagctgagattgtgattcatattcgcaataagatcttaacaggagctgatggtaaaaacctcaccaagaatgatctttatccaaatccaaagcctgaagtcttgcacatgatctacatgagagccttacaaatagtatatggaattcgactggaacatttttacatgatgccagtgaactctgaagtcatgtatccacatttaatggaaggctt

SEQ ID NO: 390 - DNA, 402 bp, Homo sapiens
  misc_feature (1)...(402): n = A,T,C or G
cgttgctgtcgtcaggacaccgggagtggaaggcaaccggtacgcgctgggtctcagccgctgcaaaaacccggcatcgcagggcaagagttgttccagcgtcctccgctgactccaaaccagcgggtcttgaccaagggattccaagagagaggattaggcccggctaagcacctgggagcagctgtggaaaaaggagagacaatcatcaggcacgatgccaaaaatgaactgtgacctgaaaaagagaagaaaggaaaattgtgcaggatgctacgttttgttttttaaaagtgggggttgaggcaataaaatacggaatatttgattaacgtaatccagaattgtaaagttgattgctcgggaggaagaaaggactgggacacaggcgatgggcctacn

SEQ ID NO: 391 - DNA, 417 bp, Homo sapiens
cgttgctgtcgggaggctgaagtgggaggatcctttgaacccaagagtttgaggctgcagcaagccatgatcacaccactgcactccagcctgggtgacagagtaagaccctgtctcaaactttttttaaaatgaaagaatccaacctttttttactctgacctgcgagagtgcagagggtctggggaacatttgcagaagcaacaggtaccagccagtgctggaaggagctcaccctgggaggtctcgtcagcctctgtccttcatggctgtcccttgtgtcccatgtggagagcccttcctccctttccacatggtaagcactgagcccaatttcttctcaccccacagatggtccctcagagcagagatgtctaatgaaaggttcagattcagatcactaactttccatcttcc

SEQ ID NO: 392 - DNA, 405 bp, Homo sapiens
cggcacgaggagacaggactacgcgcctggagtaggagaaggaggaaaaaagagaccatagacttgcatcctggcctagagcggcccttaaagtgccagggagaggagggcgggtggggaccactccagaattggccgctggcggtatcatggcgacccggaacccccctccccaagactatgaaagtgatgacgactcttatgaagtgttggatttaactgagtatgcaagaagacaccagtggtggaatcgagtgtttggccacagttcgggacctatggtagaaaaatactcagtagctacccagattgtaatgggtggcgttactggctggtgtgcaggatttctgttccagaaagttggaaaacttgcagcaactgcagtaggtggtggctttcttcttc

SEQ ID NO: 393 - DNA, 421 bp, Homo sapiens
  misc_feature (1)...(421): n = A,T,C or G
atcgattcgaattccgttgctgtcgcagcaccattatttgggtctttcagggtggccatctctgttagaagacagtagcatgttaacatcactgcattgagtttttgtctggtgtaaagaatgacttttaatgtaaacaaactgcaggtttttttcaaactaattttaagaatttagtcttatttcgttgtaaactgcggatctaattatattacattactctgttcagatgggatggatactaccacttgtccatgattttcatttgaaaagcaaggatctatatcatttccccccagacagcattatttaacactccccttaactgtgtttgaactttctcttttaacacaaatgtcacgtctttacagttgtaatatcaccatgtttcccattgctgataatacttatatgaaccccn

SEQ ID NO: 394 - DNA, 418 bp, Homo sapiens
ggcacgagccaacctgggcagctgcaatgactctaaactggagttcaggagtttctgggagctgattggagaagcggccaagagtgtgaagctggagaggcctgtccgggggcactgagaactccctctggaattcttggggggtgttggggagagactgtgggcctggaaataaaacttgtctcctctaccaccaccctgtaccctagcctgcacctgtccacatctctgcaaagttcagcttccttccccaggtctctgtgcactctgtcttggatgctctggggagctcatgggtggaggagtctccaccagagggaggctcaggggactggttgggccagggatgaatatttgagggataaaaattgtgtaagagccaaagaattggtagtagggggagaacagagaggagctg

SEQ ID NO: 395 - DNA, 404 bp, Homo sapiens
  misc_feature (1)...(404): n = A,T,C or G
tcgaattccgttgctgtcgggggtttcatcatgttgttcatgctggtcttgaactcctgacctcaggtgatccatcttcctcagcctcccaaagtgctgggattacaggcgtgagccgccacgtccggctaacaagtacttttttatttttattttattttttggatggagtctcactctgtcgcccactgcactctagtctgggtgacagagcaagactccatctcaaaaaaaaaaaaaaaaaaattttggtaaccttaggggtttaaaaacaacaaaattcatttccattttggagggtggaacccccaaaataaagcccccagaaaagccacctcttttttgagaggggaggggccccatggaagggttggcccctgcccttgagcccggtgaaccccccn

SEQ ID NO: 396 - DNA, 403 bp, Homo sapiens
tcgaattccgttgctgtcgggaggatactttcctgtcccctggctttgggtttgcccacgtggcttgctctggccttggaatgaagcagaaacgaaaggctgccagttccgagcccacgtctgaagtcgccttaggtggttccgcgggccccgtgcgctcccaccttcacccagagggccttctctggtgcagccgctgcttcttcagcctccgcccaaaaggaacggagccccctggccgatccgcaggcctacagggagccacagagcgcagcggctggaccagcgttcaagcccaagcacaggcctgcgagaaccttgttccagccgccgtttatgatggttgattatgacgcgttgcagtggcggtagctcaccaatccagtgcgtgcacccgctcctt

SEQ ID NO: 397 - DNA, 410 bp, Homo sapiens
  misc_feature (1)...(410): n = A,T,C or G
cgttgctgtcgcactttagggattgttacagtcactgttcaatgtgccttcccatagagttctttcattcctttgctcaacaagaaaacttggcaaagcctttaaatatagaggccctttttttttttttttttccccaaaaaaaattctaatggggtgccccggctgggaggggagggccgaatcttgagctagttgctccccccgaccccgaaatgaagggaattgcccggcttagcattcccaagtgacgggagaaagcgggtgtaccccccaccacgctggaatgatcgagtcgcatggactgagcggtcagacgcgggaagtaagaggcaaccggagcacccatttggattacgtaggtgctagtttttggccaggaaccggagagaatgcggcctgcattgacn

SEQ ID NO: 398 - DNA, 420 bp, Homo sapiens
ggcacgagaatccttaagggcgagttggcatggatcatctacaaaaattctgtaagcataattaaaggtgcagaatttcacgtgtcactgctttcgattgcacagctatttgactttgccaaagatctacaaaaagagatttatgatgaccttcaggctctacacacagatgatcctctcacttgggattatgtggcaaggcgagaattagagattgagtcacagacagaagagcagcctacaacgaaacaagccaaagcagtggaggtcggccggaaggaggagaggtgctgtgctgtgtatgaagaggcagtgaagactctgccaacagaggccatgtggaagtgttacatcaccttttgcttggaaagatttactaagaagtcaaatagtgggttccttatagggaagaggttggaa

SEQ ID NO: 399 - DNA, 400 bp, Homo sapiens
  misc_feature (1)...(400): n = A,T,C or G
cgttgctgtcgagaagttcttcgtcggcgcctagcgacgcccaacacctgtccaaacactgcctgctgaagatgaagtcttactacagaaattaagagaggaatcaagagctgtctttctacaaagaaaaagcagagaactgttagataatgaagaattacagaacttatggtttttgctggacaaacaccagacaccacctatgattggagaggaagcgatgatcaattacgaaaactttttgaaggttggtgaaaaggctggagcaaagtgcaagcaatttttcacagcaaaagtctttgctaaactccttcatacagattcatatggaagaatttccatcatgcagttctttaattatgtcatgagaaaangttggcttcatcaaacaagaatagga

SEQ ID NO: 400 - DNA, 423 bp, Homo sapiens
ttccgaaacaagcccggcttttggccgaagcggcctacggctgttataagacgactttaatgggtgggagagaatgttagcttttgaagcttttttatgtagcgctcttctctttttgttgataccccaggggtggctcacttgtattagagaatctttacagtccttagggtttctgaacagatgtttttcctcccttaaatggtgaagtacccccacctcttggccaggtggaagtggatgagtctggaccactgggatcagtgcagggaagagcccagggaaaatttctggggacatagagccacatttcagttttcttcccagggaagaacagattgtcaggacactggatcccaatgagtgggacgtactaaattcttagcaagtgcacattaaaattcagggtaggagagaaggata

SEQ ID NO: 401 - DNA, 380 bp, Homo sapiens
gcaataaattgtaaaagaagcattcatatgcttctgttaaatccactgtctttttttgagacagaatttcgtacttgttgcgcaggctggagtgcaatggcaccatcttggctcacctcaacctccgcctcccaggttcaagcgattctactgcctcaatctcttaaatatctcggcatagaacactcatgccccgcccgccatcctgactcagttactgtccatatctccctcagcctcaacatacctgctctcccagttttacccacctcttaccccactcatctcttcccaccacgtcgtaccacagcaacaagaacccattctctcctgttcattccctcgacttatccacgacaactaatcaccctgtattcccg

SEQ ID NO: 402 - DNA, 402 bp, Homo sapiens
cgttgctgtcgccttcctcaaagcatggttgctgagtacccagagttgcgaggagttttttaactgatttagccaggtggcaatcatgagtgaatggatgaagaaaggccccttagaatggcaagattacatttacaaagaggtccgagtgacagccagtgagaagaatgagtataaaggatgggttttaactacagacccagtctctgccaatattgtccttgtgaacttccttgaagatggcagcatgtctgtgaccggaattatgggacatgctgtgcagactgttgaaactatgaatgaaggggaccatagagtgagggagaagctgatgcatttgttcacgtctggagactgcaaagcatacagcccagaggatctggaagagagaaagaacagcct

SEQ ID NO: 403 - DNA, 400 bp, Homo sapiens
ggcacgcgggtgccttctagcttataaccattttccttgtctcttctgggttgggcaggactgacactccgaacctggcggaagaaggttcatcttcctcgcacagtgtgggttcttggagttcatccagggaaggcggcgcctctttctcaggtcctgcaggctggtctctgagcctgcccccacgaactttctggattccaaggagggatggtgagccctttgacctctgcagaccctctacttgcgaaaagcagcattgaagcagccttttcccattgtagaagggacagggagtcagatccccttaaccccccggctttcaggaccccagaagtgccttccaagcttcccccaagatccacatcacccacgaacctgccactgtttttgctgtgcc

SEQ ID NO: 404 - DNA, 399 bp, Homo sapiens
  misc_feature (1)...(399): n = A,T,C or G
ggcacgaggcccgctgggcgactgcctgcgggactgggaggatctacagcaggacttccagaacatccaggagacccatcggctctaccgcctgaagctggaggagctgaccaaacttcagaacaattgcaccagctccatcacgcggcagaagaagcggctccaggagctggccctcgccctgaagaaatgcaaaccctccctcccagcagaggccgagggggccgcacaggagctggagaaccagatgaaagagcgccaaggcctcttctttgacatggaggcctatttgcctaagaagaatggattgtacctgagcctggttctggggaacgtcaacgtcacgctcctgagcaagcaggctaagtttgcctacaaggacgagtatgagaagttcan

SEQ ID NO: 405 - DNA, 408 bp, Homo sapiens
cgttgctgtcggcaggggctaggggtggaggccagggttccaaggaaaagggccgagggagttggggaggccgccaccaccaccaccacccactgcctgcagcaggcttcaaaaagcaacagcgcaagttccagtatgggaattattgcaaatactatgggtaccgcaatccttcctgtgaggatgggcgccttcgggtgttgaagcctgagtggtttcggggccgggacgtcctacatctgggctgcaatgtgggccatctgaccctgagcattgcctgcaagtggggcccgtcccgcatggtgggcctggatatcgattcccggctcatccattctgcccgccaaaacatccgacactacctttccgaggagctgcgtctcccaccccagactttggaaggggacc

SEQ ID NO: 406 - DNA, 405 bp, Homo sapiens
  misc_feature (1)...(405): n = A,T,C or G
cgttgctgtcggcaggggctaggggtggaggccagggttccaaggaaaagggccgagggagttggggaggccgccaccaccaccaccacccactgcctgcagcaggcttcaaaaagcaacagcgcaagttccagtatgggaattattgcaaatactatgggtaccgcaatccttcctgtgaggatgggcgccttcgggtgttgaagcctgagtggtttcggggccgggacgtcctagatctgggctgcaatgtgggccatctgaccctgagcattgcctgcaagtggggcccgtcccgcatggtgggcctggatatcgattcccggctcatccattctgcccgccaaaacatccgacactacctttccgaggagctgcgtctcccaccccagactttggaagggn

SEQ ID NO: 407 - DNA, 409 bp, Homo sapiens
  misc_feature (1)...(409): n = A,T,C or G
cgttgctgtcggcttcctagctaccaataatttgtctttgtctcagcaactaaaggccatttatgtggagtatggctaccatattactaaagcttcctattttatctgccatgatcaagaaaccattaagaaattatttgaaaacctcagaaactacgatggaaaaaataattatccaaaagcttgtggcaaatttgaaatttctgccattagggaccttacaactggctatgatgatagccaacctgataaaaaagctgttcttcccactagtaaaagcagccaaatgatcaccttcacctttgctaatggaggcgtggccaccatgcgcaccagtgggacagagcccanaatcaagtactatgcagagctgtgtgccccacctgggaacagggatcctgagcagctg

SEQ ID NO: 408 - DNA, 402 bp, Homo sapiens
cgttgctgtcggaagagttagtagtaggttatgaaacctctctaaaaagctgccggttatttaaccccaatgatgatggaaaggaggaaccaccaaccacattactttgggtccagtactacttggcacaacattatgacaaaattggtcagccatctattgctttggagtacataaatactgctattgaaagtacacctacattaatagaactctttctcgtgaaagctaaaatctataagcatgctggaaatattaaagaagctgcaaggtggatggatgaggcccaggccttggacacagcagacagatttatcaactccaaatgtgcaaaatacatgctaaaagccaacctgattaaagaagctgaagaaatgtgctcaaagtttacaagggaaggaa

SEQ ID NO: 409 - DNA, 405 bp, Homo sapiens
cgttgctgtcgccataatgcaactggtagccacagagtacttattcattcatttcccagatcatcatgaaggacacttaactttgttgcgaagctctttggtgaataatagaactcaggccaaggtagcggaggagctgggcatgcaggagtacgccataaccaacgacaagaccaagaggcctgtggcgcttcgcaccaagaccttggcggaccttttggaatcatttattgcagcgctgtacattgataaggatttggaatatgttcatactttcatgaatgtctgcttctttccacgattgaaagagttcattttgaaccaggattggaatgaccccaaatcccagcttcagcagtgttgcttgacacttaggacagaaggaaaagagccagacattcctct

SEQ ID NO: 410 - DNA, 411 bp, Homo sapiens
  misc_feature (1)...(411): n = A,T,C or G
cgttgctgtcggccggcgcggcctcctgctctttgtggatgaagcggacgccttccttcggaagcgagccaccgagaagataagcgaggacctcagggccacactgaacgccttcctgtaccgcacgggccagcacagcaacaagttcatgctggtcctggccagcaaccaaccagagcagttcgactgggccatcaatgaccgcatcaatgagatggtccacttcgacctgccagggcaggaggaacgggagcgcctggtgagaatgtattttgacaagtatgttcttaagccggccacagaaggaaagcagcgcctgaagctggcccagtttgactacgggaggaagtgctcggaggtcgctcggctgacggagggcatgtcgggccgggagatcgctcagctggccgn

SEQ ID NO: 411 - DNA, 360 bp, Homo sapiens
ggataagaaatattcagcttggtttctttggaagtatatttggattaatgggtgtatacatttatgatggagaactggtatcaaagaatggattttttcagggatataaccgactgacctggatagtagttgttcttcaggcacttggaggccttgtaatagctgctgttattaagtatgcagataatattttaaaaggatttgcaacctctttatcgataatattatcaacattgatctcctatttttggcttcaagattttgtgccaaccagtgtctttttccttggagccatccttgtaataacagctacttttttgtatggttatgatccccaaacctgcagggaaatccacttaa

SEQ ID NO: 412 - DNA, 405 bp, Homo sapiens
cgttgctgtcgctggatcacggctgctaatctggatgaagcccatgggaacactcatatggtggagaggatcattgaccgagccatcacctcgctgcgggccaacggaggggatatcaaccgggagcactggatccaggatgcctacgaatgtgacaaggctgggagtgtggtcacctgccatgccgatatgcgtgccgtgattgtgattgggattgaggaggaagatcggaagcatacctgcatggaggatgctgacagttgtgtaacccacaatgccctggtgtgtgcacgagccatctacgcctacgccctgcaggtgttccccagcaagaagagtgtgtggctgcgcgccgcgtacttctagaagaaccatggcactcgggagtccctggaagcactcctg

SEQ ID NO: 413 - DNA, 400 bp, Homo sapiens
cgttgctgtcggggcatcagccccctcccgggcggagagcgcttcccgtacccttctttccactgggaccccatccgggaccccttgagggatccttaccgagaacttgacattcaccggagagacccgctgggcagggacttcctgctaaggaacgacccgctccaccggctctcgactccccggctgtacgaagccgaccgctccttcagggaccgggagcctcacgactacagccaccaccaccaccaccaccacccgctgtctgtggaccctcggcgggagcacgagcggggaggccacctggacgagcgggagcgcttgcacatgctcagagaagactacgagcacacgcggctccactccgtgcaccccgcctccctcgacggacacctccccc

SEQ ID NO: 414 - DNA, 399 bp, Homo sapiens
  misc_feature (1)...(399): n = A,T,C or G
gagaagcacacctacacctcatgggatcttgaggacatggaaaaataccgcatgcagtccatccggagagagagccgtgctcggcataaggtgaaagggcctgtcatgtcccaatatgataacatgaccccggcggtgcaggacgacttgggtgggatctatgtcatccatctgcgtagtaaatcagatcctgggaaaactggacttctctcagtggcagaatgaaaggagagccgccatgcagccaaggccatcagtcccgagggagaggaccgcttctataggaggcatcccgaggcagagatggacagagcccaccatcacggaggccatggtagcacgcagccggagaagccatccctgcctcagaagcagagcagcctgaggagcaagaagctn

SEQ ID NO: 415 - DNA, 348 bp, Homo sapiens
aaagggtgggagtggggctacagataaaaaactatacagtaagtataatgtacactgcttgggtgacaggagcactaaaatcttataattcactgctatataattcacccatgtaacgaaaaaaacgcttataccccacaagctattgaaaaaaaaaaaagtatcccttaggaatacaattttttttttgaggctgtacggcaggtgacctatttttatcataaactcaaaagggtttggctaatttttacatacatactctaggggctaatttcacagggtagcacaaggctttaacaatttccttgctcaattaaatcaatttaacaataaactggaaaatgaaag

SEQ ID NO: 416 - DNA, 360 bp, Homo sapiens
  misc_feature (1)...(360): n = A,T,C or G
atggctttggcctctgagtctttccaagtagtggcgttggtgggtctgccctccgcaagacatctgtcgtgagtgtgactcttcttcagatcagcaacagcagtcgttccctcccccgaactcattctcaagccagtcagtaagactctcttcaaagggagttgtcctgtaagtcctggcaaccgagtggtgcagcttaggagtgctgctatgcgttttaaaacggacagctggccgggcgcagtggctcacgcctgtaatcccaacactttgggaggtcgaggcgggaggatcacttgagggcaggagttcaagaccagcctggccaacatagagaaaccctgtctctacgaaaaaaan

SEQ ID NO: 417 - DNA, 344 bp, Homo sapiens
  misc_feature (1)...(344): n = A,T,C or G
gggaaatttgattattgataaatcatttgatattagtgagaaattgttaattaagagtgataatgacattatggttatgtaagaaagtgtccatattttagagatgctaatagaaggatgaagaaataaaatgatgtgacttttgtgtttgcttaagttactttggtaaagaaagaaataataaaaaaactaaatgaagcatatttgttgaagatcatttgaccatatacacaagagtttatttctgggctctattttattccattggtctatttgtctgttttcatgccagcactacactgttttgattactatggctttgtaatatgttttgaaatcaggan

SEQ ID NO: 418 - DNA, 219 bp, Homo sapiens
ttccttcaaattctgtctatatagtattttagcaaacctatgctagtaacattagaaaaaaaataaatttactaaccaaagactttatgaaggtcatacatgaagaaatgggtgttttagtaagaaacagaaatttcttaagcttctcattagatttctttagattttagttcaaaatagatttgagtgagtttatttctgatgcgttgctttaccctg

SEQ ID NO: 419 - DNA, 344 bp, Homo sapiens
  misc_feature (1)...(344): n = A,T,C or G
gatgccttgagagtttcctgttgcacaatctgtttgtctgtagagaagtggcatccagagggcggtaggggaggaaaaaaaaatgaagtaatgggacagagcagacacaggtaaagagggccttaggtcctcaggaaaggggaaagggagggatatggcccttccctccaggtcctcatatttgttgccccttgttctggaacggacccagaggcttgccttcagagggttctaatttactctgtattcntgtgtggaaaagcaagaggcagcatgtccagtggactgtgagactgagcactctaaagccagtagggtcaagtcactggtagcccactggcacc

SEQ ID NO: 420 - DNA, 353 bp, Homo sapiens
cagtacattgggcaaataatgattacgatgagaggcatgacagtgaatggatgaaacgattctgtttttgttttttttttttcccccaaaattgagtcccctcaatttttttcaccgttatccacagacttcaaaggcttaattactgcctgttagatttaggaggttttaaattttgccccctatgttccttgaaaacaccgctctttaaaaaagggggaaaaggccgggggcggtggctcaaacctgaaatcccaacctttggggaggttgagtcaggcggttcacaagggcgggaaacctaccctttttactaacgtggttacccccgctttactaaactcccaatattg

SEQ ID NO: 421 - DNA, 381 bp, Homo sapiens
  misc_feature (1)...(381): n = A,T,C or G
cgttgctgtcggatatgatgttttattcctagcctttcttcaacacatggattcattctgcaaagcaggtgagagaggaggcaggtcaggtctttactagaaagccttacctgacaccagatgctgtagagaaacccagtttctagaaggctgtcattgtccacaggtctggggagaactctttttttcttgcacatctcaaccctcttcatttggggaattcacaattgtgtaagtcttggtggaagacaggatcctgtttctggtcaaggaaaatacaaggtcagatatgttgtctccctgaacgttggtgtgtgaatcagggttcctcagagaaaatagaaccaataggggcttgtgtgtgtgtgcacgtgtgcacgn

SEQ ID NO: 422 - DNA, 358 bp, Homo sapiens
  misc_feature (1)...(358): n = A,T,C or G
ctaatacataggataaatacttgaggtgatggataccctatttaccctgatgtgattattattcattgcatgcctgtatgaaaatatctcatgaaaccataaatatataccctagtatctacccatggaaataaaaattaaaaaaataataataattaaaaaaacagtaaagcagacattatagggaagttttcaaaaaaagaaactaaaataaggtaaaataacaagggctcaatcttctgtttttgntcatttattcacactgctgcctaacataaaagaaatatacgaacataaatgggaagaaattccatccagaactctatcatatttaccttttttaaatcttggttaaaaa

SEQ ID NO: 423 - DNA, 356 bp, Homo sapiens
  misc_feature (1)...(356): n = A,T,C or G
ggaagaaatgcatcactaggggttgattcccaatctgatcaactgataatgggtgagagagcaggtaagagccaaagtcaccttagtggaaaggttaaaaaccagagcctggaaaccaagatgattgatttgacaaggtattttagtctagttttatatgaacggttgtatcagggtaaccaactcgatttgggatgaatcttagggcaccaaagactaagacagtatctttaagattgctagggaaaagggccctatgtgtcaggcctctgagcccaagccaagcatcgcatcccctgtgatttgcacgtatacatccagatggcctanagtaactgaagatccacaaaagaagg

SEQ ID NO: 424 - DNA, 356 bp, Homo sapiens
tactgtcatttgtgcatatgtagttacattttcctggaaagacctctctgtcttttcaaattgttatgttccttgaagacccaattcaaaattaactttgtggtgtgaaaaatttctttgccattccttagaaggaataattattcctgacatacttaatatttgatatgtattactattttatcgctacctttggatacttgtgtgtctttactcacctcataaagaggggttttatgcaccggctaatctaacaactacttcttaaaatccgtgtattaggacttgttaatttataataaaggcccgtcggtcaactgcgtgctttaaactataaaaatgggggctttacacag

SEQ ID NO: 425 - DNA, 351 bp, Homo sapiens
  misc_feature (1)...(351): n = A,T,C or G
catttggcagcagtgaactgtctcaggaaggcattttaaggggagctgggattgtcatcctagggaaatggccttttggcagcattgaactgtctcaggaaggcattttaagagggctggaattgtcaattgtcatactagggaaatggccttgagcgaataaaaactatgctagggtttgttcaagtctctttgtgtgtgtgtgtgtgtgtgtgtgtgtgtctgtgtgtgtgtgtctgggggtcangtgggtgaaactgtgctgaaatttgcagatcgtataggccaacggtgaggcctaaatgaaaagtgtgctcatagaggcccgatgtaagtttgcgcataaaaggg

SEQ ID NO: 426 - DNA, 358 bp, Homo sapiens
atattctttccacaattcctcttactggaatattgaggggagaaaacagattgatgaaaaacgtgcaaagccagattacttaacagttcgctttcgcaagtctgaacactgaaagacagtaggtaatattccttagagtagaggagaaagtaatgtaaacctggggttcttccctcacccaagatggtgttatcaggttaaggtgacagataaatattttttggtatgaataatccaaacaatatatcaggcttaagttcttcctgaaagaaaaatgttcaatcacttaaaagagaacagtataaggccggacgtggtggctgacgcctgtaatcccagcactttgggaggccgaaga

SEQ ID NO: 427 - DNA, 345 bp, Homo sapiens
tggaagaagaagaattgtcttgggccacacataaaatacactaacagtagctgatgagctataaaaaaaaaaaaaaaaggggctggccatatttttcaggattccccccttcccaaataaccaaaaaagccctccctttaaaggggctgaacatggttgttaactgcccacaccagtacccataaaccccatggggctttgaaattttaattttattttttatctgataaagttaaaattttagtttcttgcccgggcccgggggttcccccttattccccaccactcttgggaggcccgagctctggtgggtcccgagtctaaataaatatatcctcttcttcg

SEQ ID NO: 428 - DNA, 321 bp, Homo sapiens
tgtgcgaatgcttcacattttccataaatcaaaagggaaaaaaaagttgtgagtgaaatgtcattaaccaggacattttagaaatgcagaacctggacttttgattgcacaccatagataaaaatgcaggaaaccatagtttccaactcatggcaccatcattttgtatctttggggctataacttgccctgggaagaactatttcatttctcaacaattctaactcttcttctgaggaatcccagttactactgagaatgagtccaataacttccttcaatgttaagtcagtgatccagccagaatcagaaatattctta

SEQ ID NO: 429 - DNA, 344 bp, Homo sapiens
  misc_feature (1)...(344): n = A,T,C or G
attttaagataaccttgaaaagaatggaaatggtacatcatttgaaaggtagtggggaaagtaagaaagtgtggaacaggaaaaaaaaccaagaacttaagaagtaaaagcaggtaagattaaaaaaaagaaagactataaaaagaaggggaaaaaaaaacatagaaaaaaaatcgaaacacatcagtgaccagaataaaggcaaacagtcactactgccagttaaaagacagattctaggccaagcgtgggggctcacgcctgtaatcccaacactttgggaggccaaggcagatgggtcacctgaggtcaggagtttgagacctgcctggccaacatggtgn

SEQ ID NO: 430 - DNA, 369 bp, Homo sapiens
ttcaggactgtgagaaataaatgctttttagttataagccacccaatttatgtgttttgttataagatcccccaatggactcagacaatttggctggccagttctggctctgggtctcccatgaggctgccatcgtacatcagccagggctgcagtcatctcaaggcctgactgggggcatcttggaggctggataccacaagtacctaccatgagctaggtggtgtacaagtaatatatagcaacaacaatcataatgtacaattggaagttatttcatgtttactatgtgtccagatgttaagtactttccctgagttacctcctttatcttcataaaaaccctacaaatttggtctgggtatcatc

SEQ ID NO: 431 - DNA, 360 bp, Homo sapiens
aggggcttcccagacctgtgactgactgaacacgtgtgtgtcattacagcaaagaccaataaggcttgcaggaaaaacttgttgaattctctttgacctaaagtcacccacattcatttaactgtgaagctcttttcctcccactgcgtagcatcctatggatctatcattctttaaaatcggtatgggaaattctggtgtagataccatttgtaattagatagagtctcttaacctctttggaacatacgccttttgagaaaaggatggtcggaagggattgtgcacaattctgtgctcttcgaagcccaccgaagacccgcctccatgatcagggaaagcaaagaagggaacaaaaaa

SEQ ID NO: 432 - DNA, 355 bp, Homo sapiens
gcctgagtgacagagtaagactccgtctcaaaaaataaattaaaaaaaattttttaatctacataacactgatatatagaaaaaatgaccatgctgaaacactgtggattttagaagcaatgcgctgttgatagcccacaatgattgtcagttcacatgcaagagtcccaatgcaacctgaggattaatatgcataaaaccgcagttgttctaaaggtacaagttacttacatgcacatacataatgtacacctacacgcagttttttaaaagacagaagaaatgtcaatagtaaccaatgtcaacagcacacgttataagtgtggaattatggttttctttttagttttctata

SEQ ID NO: 433 - DNA, 392 bp, Homo sapiens
cgttgctgtcggcaggctaatgtttcatatgcatgtattttatttttatttaaagttatttttacatggcagtggaatgtgccttcatctgtcaacattaaccccattggacttgcagggcactcccttaaaaggaactgtcgcttaggggattaggcaactaaaccggacctcttgaattacttcttcactgtgctttctgaggaaatgctgattggttactgctaaagattccactaacaattcaaattggggatctttgttcccatggcatgaaaatgcccatgcccgcatgcaaaaatgctgagggtctgaaagacagattgttttgtggaaagtaaagagctctggtctggaagaagctgtttcccttaagcgtgttcgggtgtgat

SEQ ID NO: 434 - DNA, 355 bp, Homo sapiens
  misc_feature (1)...(355): n = A,T,C or G
tcagcctcccaagtagctgggatcacaggttatctctaggatagcttctaacccaacattaagcactaaaataaatattgcttccctttgcagtctctcctagggccagccaagatggaatgggggatggtcagaggaaaaaggggcagagagtactctgcctcatccagttccaaatgttggggtccctcaaggctcagacctaggccctcttctctttcctctctacactcttttcctagaagtcacctcatctgttgccatgggtttgggtaccatagttatacactggtaactccaaaatccacatctccagcccataactctcctctgaatgccaaattctccacttggn

SEQ ID NO: 435 - DNA, 308 bp, Homo sapiens
ggtctcgaactcccgacctcaggtgatccacccgcctcggcctcccaaagtgctgggattataggtgtgggccaccatgcctggccaacgcaaggtaaacttttaacgtggaatagaaaaaataattttgttaaatccctgggatggaaataacatagcgaccaaaagagtacatctttctctcacatggcaaagttttcttcttgatgctacagtataaaagtaaaaagcacggtttcagtcttccaccagatgtttaaccccaatccccactgttgtttttcacaaagcttttgggatcacctgtt

SEQ ID NO: 436 - DNA, 373 bp, Homo sapiens
cgttgctgtcgatttgaaaaggttgtggtgtagttggtctgtaattaagttgcagatttaaaactgctgttagctttgtaaatcaaaatataggtgttttttgtcctggtatatcgtcattccagctgcagatggaatcccattgatcttctagctaccattcattttcttcactgttcacaaaagaagagtgtgaaattcagtgaatgctgttactaatcctgttacgagatgaatctcatttcaccaaaattaaattatgtttttccgctaaaatgatgatacaagttgaagacacatcactctgaaattggaagacctcaccacttaaggctccacagtggcttactcagctgaactctaggttactact

SEQ ID NO: 437 - DNA, 355 bp, Homo sapiens
ttctttttaggtgtattataatcatttgcttacatcagtttcctttacaaaatttaggacagaaatctagtctgattcattctgatactactagagcatagtagaaagtagaatcttattaaacttctgttgatttgattaaaagggtacataacgaagtgaaggcagaaataaagatgttctttgaaaccaatgagaacaaagacacaacataccagaatctctgggacacattcaaagcagtgtgtagaggaaaatttatagcactaaatgcccacaagagaaagcaggaaagatccaaaattgacaccctaacatcacaattaaaagaactagaaaagcaagagcaaacaca

SEQ ID NO: 438 - DNA, 351 bp, Homo sapiens
tagaattttattctatctaattcgtttatactcccagagttcgaaattacattttacctacaataaatgagataacacttgcaaattatatggtactctgcctaacacacgttaataactcaatacatgttagcaataaacttttagtatagtagtcaaagtattaatttctcacattgcaaagttccttcaaagacatgaatacaacctttctaatgactccttgttcatcaagatacctcttcaaattattctatttacttcattcagtatattatctgtgtataccgatatgatattacactcttttttttttttgaaagggaatctaattctgtaacggaggcgggg

SEQ ID NO: 439 - DNA, 348 bp, Homo sapiens
acatttgccacacggttgggagtccttccttccttgctctgacactaacacggctcttatactcgacctttgtcccctctgtcttttttctctctcttttttttaactaatggagacacaggcataggttaaaatcagagatatcttgctcaggttttcagagcaaacactgtgttccagcccacagcatacaatagtatatgcagaatttagacactatcttcccaaactaaagagtgaacacctttcagtactttctagaacaactctagaaagaaatatatagaaacagcaaccaagtatttagcagtttttctaatttgtaagaccctttgggaaaaaaagaaa

SEQ ID NO: 440 - DNA, 370 bp, Homo sapiens
  misc_feature (1)...(370): n = A,T,C or G
gagatttgttacggattttagacatcttctaagtaactccacagaagactctcaaaacaaaagcgtgacctcaacctgcctataggtgccctagtggagaatgcttgataccaggtgacaacccccacgcgccccaatagtgcaagaacaaagtggaggccagagaaggggctggtagtttcttcttagttctcagaaggcttatctgatgatccactcacctctccttccaccttaagggaagaatggaagataataagcaaaacttctagaaagagcaattagcccttcaacttctaatatccaggtgngtcagttcccagtgagagaggtaagtgggcaatggtaagctgtgccacacaccaggtag

SEQ ID NO: 441 - DNA, 363 bp, Homo sapiens
ttccttttttctgaggttctgaaacaaaaacaaaacgtaggctctgcaacagctgaaggagcttttgaattctttctgaagaggaaattgactttacctaaccaatgcacttcctgtgtatgctatatccgctaaagagcaagacaggacctcagaggcacagtgctcaactgcagaatttcctcttggccattcgaaatgtattacagcgttctgacacaaggtcttcacttattctggtatctgtaatatgtatacaaagcaactgagggtcctgttaaaaatacagatttggccgggtgcggtggctcatgcctgtaatcccagcaccttgggaggctgaggcgggcagatcacaaggtc

SEQ ID NO: 442 - DNA, 355 bp, Homo sapiens
  misc_feature (1)...(355): n = A,T,C or G
attgcaccactgcactccagcctgggtgacagagcaagactgtctaaaaacaacaacaacaacaacaacaaaaaaaccataaaagaaagaaaaagagagagaaaggaagcaaggaaggaaggaagatataaaaaagaaaaagaaagaaagaaaagaaaaggaaagaaaagaaagaaggaaagagaaagaaagaaagaaagagaaatcgatcgaaagaaagaaacaaaaaaagaaagaaagaaatccatctagtagctctgtgttgggggattaaagagacaaatactggtggctgggagcccagtgaggaagctgtggggaggaagtaagtacattgggatgctcagagactacn

SEQ ID NO: 443 - DNA, 367 bp, Homo sapiens
tacagggaaagggaattccaaaccaagtgcacagcacaaacaaataaatgaagacctaaagcattgaatctttcatggacacttctaggcctaaatcccttgactttataaatgtcatggtaaattgcataatgcatatcatcatgccaaaattcatattttataatgccatatgttagatctccttactgtggtttcacctgaggcaatcttctgaaattttctttaaaaaaatgaagagttgtctgggcgcggtggctcacgcctgtaatcccagcactttgggaggccgaggtgggtggatcacctgaggtcaggagttcaagaacagcctggacaacatggtgaaaccctgtctttacaaaaa

SEQ ID NO: 444 - DNA, 356 bp, Homo sapiens
ggatcaaatccattgcaggaatgaaggatttatttttttttcagtgtctgaagtactgccaacaaataaccctcagctctcagtccccttgtggattgcccctgctaaataaagccaccagagcctgatttatgcctcttcctgaggtggcctgtttccaatgacagaccactgttggagtatgaaggcctaaccagctcatctaatttggggagagctctaaagaataaggttattttcagctccagagtctcatgacatctcaaactacatcatagctcatcatcttctgaccaaacagccttcttcatttcctgtctatgctattgctccaaagagcatttcctaataaacct

SEQ ID NO: 445 - DNA, 354 bp, Homo sapiens
caccatcatatatgcattttgttgttgaccgaaacgtcgttatatattctttccatacatagcatgtggaaagaatagatctcttttttttaattgttccacactttaccatataatggaatacgcaaaatttcacaatacctttcaggatgtaaaatacatataccctttgacgacattagaaaagagaaaatgtgggccgggcgcggtggctcatgcctgtaatcccagcactttgggaggccgaggcgggcggatcacgaggtcaggagatcgagaccatcctgggtaacacggtgaaaccccgtctctactaaaaatacaaaaaactagctgggcgtggtggcgggcacc

SEQ ID NO: 446 - DNA, 183 bp, Homo sapiens
tgggttccgctgtgagaacacgacagatgggttcggctgccatatgacgatagacaggtactcgctgcgatttcactgactgattgtctccgtctccataatttttctaattgttactggtgggagtcttctccctgtcttgcctttttgtttgtaatgtcttgacagtgccgcgatccctcc

SEQ ID NO: 447 - DNA, 351 bp, Homo sapiens
tcagcatacaaccctagatgatcttgtcgtgaagatgaaggagatcacagacaacatcttgccagggtctgagttttaatgctggcgttttagatatcctgttgggctacaaaaacatgtcaggcaagatgttaagttttgtttaaagcatcaagaattccaggcccggcgcggtggctcacgactgtaatcccagcactttgggaggcctaggcgggcggatcacgaggtcaagaggtcgagaccatcctggttaacacggtgaaaccccgtctgtactaaatatacaaaaaatttgccggccgtggtagcgggcgcctgttgtcccagctacttgggaggctgacgcag

SEQ ID NO: 448 - DNA, 347 bp, Homo sapiens
tataaatagttatcaaatactcacagtatttcaggtactgttttaagtcctttggaaattttctataattaaaatttacaataatctttcgagatagcaactatgattattccaacttttaaaaaattgaagtttagagaggataaacaattgcccatggccaggtagctactaagttacagttccaagattcaaacatacagcttgactccagagtctatgcttttaatcaatacttaaaactgtcttgatgtagattctgatgggatattcagctatttctcctcagaattgtatatgtgggaatagtatctgaaaaacttggattcctttatatgtaaggaaaa

SEQ ID NO: 449 - DNA, 346 bp, Homo sapiens
ttccagttcctgcttcataacagatgctcaacagatgtttattgattatgaaaaggatccctgaaaagctttctcctggaattagactctcagccctagaatagagcaagcctgcagaaacgagaactggaggcttgaaagtcctccataactgggttgaagagaaaccattttcctgtaatctttttttttttttttttttttggaaaaggaatttttttttggggcccgggggggaaccccagggcctgctcgagaggtgcggaaaccctgggtcgaaaagaccacccaaagacgccgcgccaaccttcttttttctggggaaaaaagggggctgcccctcccc

SEQ ID NO: 450 - DNA, 350 bp, Homo sapiens
catagaaatccaccattcacgtaagttttggcctggtgttattgcagtctcttaatttagccaacaaagaaggttggctcaaagacacctgtttttgcatgtaaagtatcaggctggaaggcttggtcgggcatggttttagcaacaggactttcatttgtgatagttcagtcacgtcctggggaattgaggagaagatccaccctaccaaaggccagtcttgctttagcaccaaagaattaattttaaaagttagagttggccgggcatggtggctcacatctgtaatcccagcactttgggaagccaaggtgggcagatcacctgaggttaggagtttgagaccagcc

SEQ ID NO: 451 - DNA, 369 bp, Homo sapiens
ggattattgagaacaacagaattcaaaacccttgaaaaagaaaatgatgtgtatctatattttaagcagaaatacacaaacacacttatagtaactacaaataacatctagtagctcagacctattgccatttatttcatgttcaatattgtacagacaacatactatgaaaagtgatgtaccatatttatacgtatacaggtgaatttcaatccaacactaagataattactttatgttgtagaaccatatataaatacttttttgccctgctctaaccattgcttatcaagactttaagattatgaatgaatggtcatacttattatatatagaaactattatttgatgaagggtacttgcattcct

SEQ ID NO: 452 - DNA, 357 bp, Homo sapiens
agaatagctttcatcccaaaatttgcttggaaatagttagatcatttgatttaattttcacttttataaaataagtgtaggaatcctaaaattgattacttcatttgaaacacaaattcagtaggacgtaatgcatgaaataatttaatttttgacatgtacatcgaatcataatttaaaaacaaggtctgaccaggtgtagtgcctcatgcctgtaattccagcactttgggaggccaaagtgggtggatcacctgaggtcaggagtttgagaccagcctggccaacatggtgagaccccatctctacaaaaaatacaaaaattagcctggtgtggtggtgcacacctgtaatcct

SEQ ID NO: 453 - DNA, 264 bp, Homo sapiens
gtgtgtagtgatcatctgtagttgttcaaacgctctctgaagcttatgctcttgttcatgtcccatttttgagttgtgcctacatgatgctggcaacagataagacatgtagttttaataaatcactaacctttatattctgcttatttttaaattataaattccatctgtgtaaatagtttctctcttcttgcactttactaaaagcagttaaaagaaaccattctgaggctgggcacggtggctcatgcctgtaatcccagc

SEQ ID NO: 454 - DNA, 352 bp, Homo sapiens
  misc_feature (1)...(352): n = A,T,C or G
tggtcttttggtttttgttgtgttcatttcacagcanatcagtgagcgtgtccttactgcctggccccagttcaagtcctggtgttagtgcttcggctttgaagtcagatgacctggggtcaagcctgtgccttgccactgggtggctgagtggccttgggcaagctatttgctaaactttctgtttctgcatgtatacaaagtgaataagactgattcctttcctttggaaggctgttgaaggtcaggcctggccactgattcttataattctttttactaaaagcagaccgaaaagtttaggatcgctttggggccactcctcttgaattcaagccttgcccccttttcc

SEQ ID NO: 455 - DNA, 350 bp, Homo sapiens
tacctccaggcatgtggacatgatggctagagctacagtcacattttttttttaataccatgaggcaagtctttggatgaaagttaggggttaagtaaggagaaacagaagaatcataggcacctgggccactgttgttactacagagcttctgcaccagctctacctaagaagaatatctcttcctaatcttagtgatatgtaggaaaagaactctctatttgtttaagccattttttttcctagactctcttataagcagcaaaaaaaagtcccaatgtggtggccccttcccatagcctctgaaatgaaagaaatgggttagaaggcagaagtggatatagatgaat

SEQ ID NO: 456 - DNA, 380 bp, Homo sapiens
  misc_feature (1)...(380): n = A,T,C or G
cggtgctgtcgggattattatgtttggaagattattatttttgaaagacaacttttctgttgccaaactgtcttctaaagaggttgttcacatttctagtctactaacaatttatgaaaatgcccaccttccatgggggaatattaaagactttgcctgaaatgatagaactctattgggtagtggctgaagtaagtttgagttggtaaatcaggggtcagattatggaaaaacttacatgttggagaatcagctattctcttggtgagtttcttctttctttgacagattaacaactttccagcaggccaaatgagaattattggctagctttgtggagctgtgagggaaccctcttanaagatttctcattctctctn

SEQ ID NO: 457 - DNA, 395 bp, Homo sapiens
cgttgctgtcgatttttgaattttttcgtagagacagggttttgctatgtttctcaggctggtctaaaaattccagagctcaggtgatctgctcaccctagcctcccaaagtgctgggattacaggtgtgagctaccgcatccagccctgaatattctttcagaggtagggttttgtgtgttttgtttttagttcaagcagtttgactacatcctaaggtataaaggtactaataaacaagtcagtttttcttttgtgcatttttctttattttagagccttcagggaaatttttttttagaaagatcaagagaaggccaggcgtggtagcttacgcctgtaatcccagcactttgggtggccgaggtggacagatcacctgaggtcacgagttg

SEQ ID NO: 458 - DNA, 356 bp, Homo sapiens
cggggttggggttgccgataccactgctggtatgctgtgtaaaaacagccttgtttgagtagattgcgaggctatcgctatattgacttccctcttcagctgcgttattgaggatcacaacttattttgccagcactctacgctatgggaccacatagaggtgctctaagatagtaacattaaagaggacatataatataaccaaaaatttgagttccagataagtttggtgtctcactagcaagatgacgttaaataactcatttaatttttttgaaatcttaattttctgttcctgaaaataaaaagcaatctgtctcttgtccaaaagactatgtagggtttttaaaaatttt

SEQ ID NO: 459 - DNA, 393 bp, Homo sapiens
cgttgctgtcggtggcgggcgccggtagtcccagctactgggaggctgaggcaggagcatcgcttgaacccgggaggcggaggttgcagtgaaccaagatcgcgctactgcactccagcctggcgacagagggagactccgtctcaaaaaaaagccgggcagaattaatgattttgaagctccgagaaacaggattaaattcctctttcaaaccgaaatcggaatttgattttttaaaagtgtaaaataccataaacttttaaggttagttgttcggtaaccatgtcaccaattttaaggcactttctgagttgtgtatagtttctccagagccctaggggaaatgttttgcaaaatatgcacgtttagctttccaaaacaagttgtcttttt

SEQ ID NO: 460 - DNA, 346 bp, Homo sapiens
  misc_feature (1)...(346): n = A,T,C or G
cgggaaggaagattacctgctgtcaaattagaaaattacaattaaaccattgatatttccgtgagaagagaaaactagtaaccgtgaagaagtgagggaaaacaaatgatgacgtcatgttaacaataggaaagacatgtccttttgtaaaagatgctgtcacccatcacagactatttcttccaatatggatttgcaaaacatgacagtcgagctcaccaaatctctcgtggttgccgtggggcagggcgaggtggcccacacctgtaatcccagtactttgagaggccaaggagggaggattgcttgagcccaggaggtcaaggctgtaatgagccatgatcan

SEQ ID NO: 461 - DNA, 353 bp, Homo sapiens
ccatgtgaggtgacgccccaccctgcttcggctctccctctgtaggctgcacccactgtccaaccagtcccaaagagatgtaccaggtaccttagtgggaaatcactcgtcttctgcgtcaatcacactgggagctgcagaccagagctgttcctattcagccatcttggaacagacctcccatggtagcatctttaaactgaaatattggacagagagtttccattgctgtagtattttgcttaattattatctttatagcagggataatagttgacaaaaaggaagcatgaaagttttaccatcactgagtctgctaggccttttttggggtctagtaatgcagttttaaa

SEQ ID NO: 462 - DNA, 347 bp, Homo sapiens
  misc_feature (1)...(347): n = A,T,C or G
gagtagcagcagtgacttaacagatttttttttcattgctgctgcttcttaatcccttttgagcctcaatttctttttgtataaaaggggaacaataacgattttgtagagatgaggtatgcaaagtctctggctgcagtgagcactcagtaataagagctatttattgggccaggattccaactactttcataaaaatagcaggaaagtcaaatggaaagctgacttgatggtaggggaggcttctgcccaccaactagttccacgtttctcaaccctgcactgaatgttaaaatcacctggggaacttctgaaaaattatgatgtctggtcccaaccccatggan

SEQ ID NO: 463 - DNA, 359 bp, Homo sapiens
cgggtgactcaatgtattcacaggcttcaaaaatatgctctaagaaaaaaatgggggaaaaggaacagtttttcatttcaaaagaattccagccaatgaatgtcaaaggaaagagggaaatacagtatcaccattaggcaaacaccacagtaataattattgctgataagatccactaatggatgctaagattaatgggcaaaagttgaggagaaataagatatttgccgaagcctcaaaggtatctccctcaagatatttattaatacaagccgtgcgcggtggctcacgcctgtaatcccagcactttgggaggccgaggcgggcggatcacgaggtcaggagatcgagaccatccg

SEQ ID NO: 464 - DNA, 225 bp, Homo sapiens
  misc_feature (1)...(225): n = A,T,C or G
ttccttcaaattctgtctatatagtattttagcaaacctatgctagtaacattagaaaaaaaataaatttactaaccaaagactttatgaaggtcatacatgaagaaatgggtgttttagtaagaaacagaaatttcttaagcttctcattagatttctttagattttagttcaaaatagatttgagtgagtttatttctgatgcgttgctttaccctgattacn

SEQ ID NO: 465 - DNA, 397 bp, Homo sapiens
caattctgcacgagcctagctacaggttttaggtatgataaagacttggttaccacaaatagctgaccagaaaccataattgggcggaggcaagcatcagctgaccaagcattttccaagccaccacagtgattcagctgcttcctctcctgcatctcctatggaaaagatggaccaaacacagctaggacatcaagctttaaaaccaaagcaaccttggcacctcacacaatggccagctatgaacctcacctggatccacaccactccaatttgcaacccccctctcagctccccaggtactatctcctttagccatggacctttaagcactggaaccggcattggcgtattcttttcctccgcatggagtgcaacccttctcccactctgcccg

SEQ ID NO: 466 - DNA, 347 bp, Homo sapiens
tagataagtattggtcaactttgatgaatcacccataaccttaaactaataagtcaaaacctctttatactttgacaaagcaccattagatgattcttaggtccaccaaaggttgataatcactggcctagatgatacagcaataggtaaaactagggtgacagcagtggaaatggtaggggataactaccaagaaactgttttcagtaagaactaaaaggcattacagattgatgaaatgtaagaatatgaagacaaacagtcaaagatttaaatcttgattactgaaaaacttacgatactattaaaagattaagaagtcaggaggagcttaaaaacctagagaa

SEQ ID NO: 467 - DNA, 366 bp, Homo sapiens
agggcaagactatacagactttaactttgaattcccccaaattagtacagggtttagtacagagaaaggacttgatacatttttatacacttttgaagaataaattgatatttatttagtactcagtgtcagccaagcacttaaacactttacattcattaccccatggcatcctcacagccttctgaggtagaaagactcactgaaggttcagtaaagtggggaggaaggcacgacttgaactcaggtctgtctgactccagatgtcttagaaaggtagaatctttcacttggaagacagtatggttaagatcatgttctccgggccgggcacagtggctcacacctgtaatcccagcactttgg

SEQ ID NO: 468 - DNA, 346 bp, Homo sapiens
tacctgtgcccaagcagacatctcccccaatttgtgtatttacacccctcctgcctgcagaaaggatgaaacaggattaccctcaaatttacagctataattaaactattattaaaatccaggtaaaaaaacaagagcactgcaaagaagagcgtgtgtgtgtgtgtgtgtgtgtgtgtgtgtgtgtgtgtgcgcgtgtataaaaattctgtcacacacacctgggctggggcagcttctctgggatccctgaatcacagagtgctagcaccagaggggctttcagagataaacacgcttcacctgtttttatataggactgacacagattaagagatttggcagg

SEQ ID NO: 469 - DNA, 189 bp, Homo sapiens
atatacgtgtattttttgggacttgcctgtttctgttaatatcggagtgttaaagaacatctctgagtaatttggttttgtcattgaactatttttagtacattcatgtctgaagagtgatgtgacttgagaactaagcttcttcctgctttacattcatcatttttccagaagccacgtagtgtgcca

SEQ ID NO: 470 - DNA, 348 bp, Homo sapiens
gggaaatttgattattgataaatcatttgatattagtgagaaattgttaattaagagtgataatgacattatggttatgtaagaaagtgtccatattttagagatgctaatagaaggatgaagaaataaaatgatgtgacttttgtgtttgcttaagttactttggtaaagaaagaaataataaaaaaactaaatgaagcatatttgttgaagatcatttgaccatatacacaagagtttatttctgggctctattttattccattggtctatttgtctgttttcatgccagcactacactggtttgattactatggctttgtaatatgttttgaaatcaggaagtgt

SEQ ID NO: 471 - DNA, 187 bp, Homo sapiens
atatacgtgtattttttgggacttgcctgtttctgttaatatcggagtgttaaagaacatctctgagtaatttggttttgtcattgaactatttttagtacattcatgtctgaagagtgatgtgacttgagaactaagcttcttcctgctttacattcatcatttttccagaagccacgtagtgggc

SEQ ID NO: 472 - DNA, 188 bp, Homo sapiens
agtggaacgatatcttcagaacgctgagagcgaagaattctcaacctagaagtattccagagagcgtaccttctatgaatgcagataaaataaagacaatttgtagataaacaaaaactgcagcatttattaccaagggactaaagtaatgtctaaagaatctatttcaggaaggaggataaacatgg

SEQ ID NO: 473 - DNA, 393 bp, Homo sapiens
ggcacgagctggggaggagccaaagccttggcgctcacctaagccgcagggagatacacccaactgggagatgaggaaacagcaacccacagaggagaactaacccacacaggatcatttcgtgaaggagcaaggctgaagaaccagacctggactttcttaggcaagtaaattctgattatatcacggagacttgctttgagaaatctgccccttttcactgtgagatggcgtcattaacacatctagttctctcctaagcagccagcaaacatttattatacactagatattatattggcatttgagatgatacaaaggaataaaatggggcaattagctctagtaatttggaggtctcaacttacggatattccaagttcctttgaaacg

SEQ ID NO: 474 - DNA, 369 bp, Homo sapiens
tgtgtctaaggaactgaatgtttaatgtgacttaattttcattgacttataagcaacaatgccacctgaactttagcatttcttatatcctcagcccatttttactttagcaccctagcaaacattcagaagtgacatggtcattttcttccttctgggatggagcgttggctctctttattgtcattaagatctttgaaagcaataagaagatataattagccgggcatggtggctcacgcctgtaatctcagcactttgggaggccaaggagggtggatcacctgaggtcaggagttcaagaccagcctggccaacatggtgaaaccccatctctactaacaatgcaaaaaattagccgggcctggg

SEQ ID NO: 475 - DNA, 358 bp, Homo sapiens
  misc_feature (1)...(358): n = A,T,C or G
tctccatctcaaaaaataaataaataataaaggtaggggtttcttaattcttttagacagatatcctcacattaatctgtaaaggacaaaaaaataagactttaaactcttaatttgaaaagatatctccatttaaatctcctttgcttattttattgaccacctcctttgcggatttcatttcctatccttgatttagaaaaaggttaagggccggtcgtggaggctcatgcctagaatcccagcaccttgagaggctgacgcaggtggatcatgacgtcacgagatcangaccatcctggctaacacagtgaaaccccatctctactaaaaatacaaaaaattagccgcgcgtgtg

SEQ ID NO: 476 - DNA, 365 bp, Homo sapiens
ttagccttttgtatgcttttactggataattttctctaaggtagagggtgaggagctatatattatgtaacattttagaaatagcagaaaaccatttagggggaagaacacacaccaaaactacccgataacttctttcctgattaaaattatcttccaacaattcaattatatgtaaagagggaaccgtggctacacacgtatttattaactgtttctggcggtccagaggaagctggattatttttaccataacaaaatcaagtttttttcagccgggcgcggtggctcaagcctgtaatcccagcactttgggaggccgaggcaggcggatcacgaggtcaggagatggagaccatcctggt

SEQ ID NO: 477 - DNA, 366 bp, Homo sapiens
gcgctctgtggctgggcattttaaacctgacctttctggctctgagtttttccattttaaacctgacctttctggatccaggcgaaggcagagacaagataaaataggattattggatggcagaatgtattcaactatttctcctgaaacttggaaccgtattataccatgggggataccacactgacggaaacggtggataaatgtgagttcatatatactcctccacaaatatacatgtctcatgctgggcgcattggctcacgcctgtaatcacagcactttgggaggccaaggccggcccatgacttgaagtcacgagtgtgtgaccagcctgaccaacatggtgaaaccctatgtttactc

SEQ ID NO: 478 - DNA, 367 bp, Homo sapiens
ggatcaatacaacaaagttttctgtttagaaaatacaaaaaaaaactataaatctctaaagaaaaaaggccgtgtcctctgaactatgccacagatatagaatgtagaaagattgtataatcattacatgtttaaagtagatggtgaaagcctagctcggcacctaggacggcacaaagtaaatccttaacaaatgcctgtaagtagtgggtacttttgtaaagaaaaggctccatgtttttgttgttctggaggtgtgtgtgtgtgtgtgtgtgtgcgaccctcaacaccgccacataattactaactaaccctgtgtacggtagtcccccctttttcttataaacggcccctcattctttatttc

SEQ ID NO: 479 - DNA, 367 bp, Homo sapiens
  misc_feature (1)...(367): n = A,T,C or G
gcatccagcacgggataaagaggctgtgagaaggatgaacagatttttggaagacgcacatttttgtaaagctaactcagatagacttcactccgtcctcatgccctgccagtatctttaattttaaaagaggaagaaggaagcatcgtctcttctccccaacagataatactgggtgctctgtgcacagggtgacattaaaaaaattaaaaaattaaagaggaaggaaggaagcaacgtctcttctccccaacagataatgccaggtgctctgtgcacaaggtgacgttatccattcattcctctctcaggtgtgggagtgagggtaggggagggcatggcaacgatggcctttgccagggacctn

SEQ ID NO: 480 - DNA, 337 bp, Homo sapiens
acaacaaaacaaaaccaggtgtagtgtggctctaaaggaacatctgaccaggttcctggggaaccagggccatgggaggaagaagggactcttctcccatgagaagggcctggagatgcagggactgtcaagtcactttggccaactttttttgctcccctagaatgaactctgcactaaaagtggagaatcacttctatgagagaaagacatacaaagaaaagatataaggcaatgctacagtaagttgggcatatctatcaaaatttaaaaacatgtatactctttgaggagtcctattctttcaggaattcattttgcccttattaactatatc

SEQ ID NO: 481 - DNA, 383 bp, Homo sapiens
  misc_feature (1)...(383): n = A,T,C or G
ttggnctcggttggacagtatgacagaaagggacacaggttggagcacagaaagaagaatcatagaggtgccaaaggaacttagacataatgatgtcgttcaagccaacaagccaagctgaagtaaatgaaaccatacccaacccttacccaccaagcagttttatggctcctggatttcaacaggctctgggttcaatcaacttagaaaaccaagctcatggtgctcagcgtgctcagccctatggcatcacatctccgggaatctttgctagcagtcaaccgggtcaaggaaatatataaatgataaatccaagtgtgggaacagcagtaatgaactttaaagaagaagcaaaggcactatgggtgatccacatcatggtt

SEQ ID NO: 482 - DNA, 355 bp, Homo sapiens
ctcttgcggtgagggaaagcaaggggaccatcccttgccaccattatctggtaaatcccccatgtgatgcctaatgccttccatccaggcatctaggcctaccccaaatcagcaagtttgaaaggactttgttgtttatatatacatttgcttcattcagctatgaagcaccctgtctcttaccagacctgcaccctccaccccactgatttgcttttgggttgttaaagggttgcgatacactgcacttgccagacatacctctaaaatagctgttgactcttgcctcatccctaaactctcctgctgggagacccctcctattctatatgcgacgctttcatgtgtgtacccg

SEQ ID NO: 483 - DNA, 350 bp, Homo sapiens
agttcgaagaggtagggagagaatttccatgggaaaaaattgttggattgtacttcaatacaagtaacaggaacttcaagaggacctctaagaaaattatatgtaccacttggagtgtaggaacatatggactggatctgagacccagtaagaacagtaagggtaaagtctatggctgtgaccacagcactgtgtctggtcacaaaataaggaagcctgcagtgggagcaaacttcaccttcattgataacgagcaaaggaagctcaggtcaaagggagccaccatggggctgccttaaaagggatcctacccaagaggttaagtgctctagcagaacaatgggacccta

SEQ ID NO: 484 - DNA, 376 bp, Homo sapiens
cgttgctgtcggtggcgctctttatatcttggttaccttatctttctgtggaagagatttgatgtctaggtttgtcacatcatgcctgtttcctatcactaccaacagggttgttatctagcaaccccgattgaatacgtggacgtcgcggcttggcctcacagactgtgcgaggatagggtacttggggtgcgcctttgcaaattcgtatttataactagagtacttgcatttccttagagtacctgacttgcccagagagaattagcctttaattttaatttgtatgacagaggattggaaaccttagtcccagtacgtttagcaacattccaaatagcttacaatttctgctacatgccagtgcagttataag

SEQ ID NO: 485 - DNA, 375 bp, Homo sapiens
tctacggttgcgacaaaacgacagaaggggcattttgatgtctagaatcaggggatccaggatcatcaccaaggtcattttcctagacagatgtgctgaggctgtagaaagtgctttttatttggatgggagcttgtgcataaatgcgagaggggctgcccatctgacggactagaggagactcatggctgaaccggaacaggacatcggggagaagccagcagagcttgtgtttaaagtcataattcagaaccccaaagaaaatgacttcattgaaattgagctgaagagacaagaactgagttaccaaaacctactaaacgagagttgctgtgaactggggattaaaccacaacgagtggagaatatcacact

SEQ ID NO: 486 - DNA, 343 bp, Homo sapiens
  misc_feature (1)...(343): n = A,T,C or G
actatcgaaacagatcaaacgcatagagaaagaatacaacctttcaaattatttatatgaacacagtataatatggatgcccaaattcaatgaaatagcgcttctctctacaaccacctagggctagtacttgagaaaactgatactggcgcacaaccttcaatactatcacaacatatttcttagacctatacccatatgtttatctaaatcacatggaaaaataactgtgcacaaatagagaattcttatgaaagaatttaatgaagagggagtgaagaatggtctattataagcctactgcaactaaaagattgatgctctgctgcactaaaagatgagn

SEQ ID NO: 487 - DNA, 358 bp, Homo sapiens
atactctcttatatgctagagatagaccccagctaatgagctctccctagaacaggtattctgtcactcactcacacacacacacacacacacacacacacacacacacacctttttttacactgagagaatgagaaaaacattaacttttagctctccggtggccatattttcttaaaggaggaaatcattacacagtaaagcattaatggccagtgtgtgcttaatttaacaacactacaaattcatgtagagatgtctgattctctagagaggaaactgtcattccttagctgcagtcccctcttcaactgaagaaatacatttcaccactaggggtccacaggggaacaaagga

SEQ ID NO: 488 - DNA, 353 bp, Homo sapiens
aagttagttttgcagctctccagcatatagaagagcagttctatattctgatttctttcattatagtgcactgacttccactggttatgtgggtaagaagggtctctgacaatttataaaacaagatggggaaaggagaccagcaaagcatgtatataaaacatttgttgcttttttaatcaaggagaccagaaactgtggtagtgccccaacgctttgattgaaggccgctgtatattgagtgtattcctcatgacatattcggactgattcagactttccacagtgcttattagctcattctgtgcctcaattcttctgagcacattgtcccattaagagtagtcaaaagg

SEQ ID NO: 489 - DNA, 353 bp, Homo sapiens
  misc_feature (1)...(353): n = A,T,C or G
cgggggtggagcttcaggtatgaatttttctttctctttttttagtgggcacagctatgatatcagaaggtaggcctggaaccaagctgatgggagagggaagacctgaactggtcagtataagaaggaaatgatatatgaacaggaatgaaatggggcgcgagtggtcatatagcaaagaaggaagtgtgggcagtgagtgcctgatggctgcggagtttctgtttcaaacgataaaaaaaaattttagaaatggacacaacattggccgggcacggtggctcacacctgtaatcccagcactttgggaggctgaggcgggtggatcacctgaggtcaggggttcgagaccn

SEQ ID NO: 490 - DNA, 343 bp, Homo sapiens
tactgctttgtgaggaatgtaaaaaagactaacggaaataatgcaatgatttacaacgtatgaatgatgcttaaaatgtagtactaataaaagataataattattatgcactatgattactgtgcaagttttaagaatgaaaactctccctaacacttggaagtgagcacactaccattgtccaatgtgaaaattacagaacagctcccacacactatagggaagatctttctatcatcaggacagagacaaacctagctgctccttctaagaactctattcatatacttatacacagaccaccattaatacaccatgagttctgtcaaggaatcttatttat

SEQ ID NO: 491 - DNA, 360 bp, Homo sapiens
ttcactgtctcctcactcccaactgtgggcagccaggtgtgcttctacattgcaggtctggccccacatcccctgctgcagacctccactggcgcccccgtgaccctcaggatctgttcccagctctggaacaggctctccggacccctggccactggcaccctgggcagcttacctcgtcccactcctgatagccccccaatgaccactttatgcttcagccaaatctagctgttgacagctcctcaaacgcttgggctggctaagcctctacagtttccatgactctcttctgagccggaaacacctgcctcctccctacgtgcattcattcccacccccgaaacgggacaaactcct

SEQ ID NO: 492 - DNA, 305 bp, Homo sapiens
  misc_feature (1)...(305): n = A,T,C or G
agtcataagcatcttttcaacacttgactgtttcctgtgaaatgtatttaccctcataatagttctagtaaacagaccctgcgatttgggtggcttgagcccatcctggctcttcagccaagatgacaaatttataaatccattctaatcacatcatcatttagcaaatgctttatttctggatccaaatttacatgtctacctgaatctaagattttatgcttatcacggctatggagagaacatctcttcctattttgtgagcaggggatactagaacaataaagcgctcgctcatgacccan

SEQ ID NO: 493 - DNA, 356 bp, Homo sapiens
ctcaggagaaggttagaattcactataacaaaagtaatagggttattaatatgactagtattctaagactctcttaataggtgggagcaggtagctcagtttacgggtagacatttatgggtaagtaacaacattggtgaagtgcaaacacctctctcctagcacacacaacacacacatacgtacattctttttctttcacacagacacaaacacactcccatggacaaagaaatgctacgaagaatttccttctctcaaatatgctggatgactctgttaggttttcccacatagaatggagacttgagtgtttagtctgggccccacgcatgcagataagcaccaagttggat

SEQ ID NO: 494 - DNA, 351 bp, Homo sapiens
gacacaggttggagcagagaaagaggaaacatagaggtgccaaaggaacaaagacataatgatgtcatccaagccaacaagccatgctgaagtaaatgaaaccatacccaacccttacccaccaagcagctttatggctcctggatttcaacagcctctgggttcaatcaacttagaaaaccaagctcagggtgctcagcgtgctcagccctatggcatcacatctccgggaatctttgctagcagtcaaccgggtcaaggaaatatataaatgataaatccaagtgtgggaacagcagtaatgaactttaaagaagaagcaaaggcactaggggtgatccagatcatggt

SEQ ID NO: 495 - DNA, 292 bp, Homo sapiens
ccatagttaaattatctaactatgttataaacattgggaataactatgttataaacactgggaattacagagaaatattatggaaaggtctgattctaaaaatgcttataattgcttggagaaacttggtcgtgaataccaagacaataaaagtcaaacaaaatccttaatttagtttactgcagttgttcatgtggcactggtccctatggaagcccaaaaaaagtatccgtattataagtaaagctgtgccaaaacatgttaaagacttatatttctttatacttataga

SEQ ID NO: 496 - DNA, 346 bp, Homo sapiens
gaatatggagattggcagtggcagcgagaggttttggggtacagctccgcacactgattattgagtcagcagttaatggaatctgccaacacaaaactgaaatgagattccatgtaaagcctacacaatagaaaaatgaatgtttaatgagcatgaattgtatcataccatgctgtttctaaaagtctccaagcttagaggaaccttagagaggatcttaatgagctataataatagcttccattcgcaaactggtatgtataagtctaacatgtccacattagatcgctgctccctccaacaaacatggggaggcttagcagtttcctctcactctactaactgc

SEQ ID NO: 497 - DNA, 347 bp, Homo sapiens
  misc_feature (1)...(347): n = A,T,C or G
cgggcttacttctcacgatgtcaaagttcatcatacagtcacacagagctgcaagggagtctaggaaaaacagtctcaaaaagtagaggtggacagcttctcagggatctcccaagctctgatgactctctcaactctgcttctctctgggttccagactagattctctcagaaaaagtcttggaatataggatggaaaaaaaaatccagctgctgcacctatagattcacagtctgagcttctcccaccaccctctcagtctttgctgatcaaattcaggagaaggttaactagcctgtcttgaaccgtatgtctatctctgggataatctctgcacctgagaaan

SEQ ID NO: 498 - DNA, 368 bp, Homo sapiens
  misc_feature (1)...(368): n = A,T,C or G
ctctcagcctcgtgctatacaccattaaaacaacaaatgactggctggaaatagaggctttcacagaacagatcctgagcctgtgaccttccacatccagctgcccattatcctttggttcacggaaacagccctgacaagctcagcatggctacagaggcctcctaaagagagggtggagcgaaacctgggccctctgatatatgcacctgtggacggagactcttctctgtcctctatcccttgtcagatgccagggtattagatatggctatcctttccccacacctctttaccatctgggaagccccttgggattcactgagtgaatagcaatggaagtttgtacactangccgatagcactgn

SEQ ID NO: 499 - DNA, 288 bp, Homo sapiens
ctatgatccaggtaagagttgggggaactgcagagtgacccgagctaggccagtgactttggagttagtttctttacctctttgggcattagtggcctcctctggggctggacttagagtcttgggagtcttttagtgcctactttgttttatttctgagccaaagtgatttggataatacacagtacttaaagaactgaagccaagccagcttccagtccctgggcccagtatatgtgggaaaccggtacctactgagtccccatgggatgacacaggtactgccct

SEQ ID NO: 500 - DNA, 393 bp, Homo sapiens
cgttgctgtcgaacacaattagccactttttcagctacacttctcactcagctgcaccctacacttctcactcaggtgcacccccttctgctgtcctttccccaacgtactgggtcccgagcgtggtgggtatttgccacactgggtgccagctcagcagccccccacctctctttattctctccaaagctggtctttctgactatcattgtggtagggggaggacagatgctaaaggtggaagctgacctggagaaagagacacacggggtgactgtggcaaaggacagctggaaaagaaactctatcacttcttcattggcaaccacaaggcacctgaggccatggcactcccagaggctgtgcgcagagccaagcctctcaacctcttcg

SEQ ID NO: 501 - DNA, 368 bp, Homo sapiens
taatatttttaggagatacagggttttgccatgctgcctaagctggtctcaaactcctggactcaagcaatccacctgccccagcctcccaaagtgctggggttacaggcatgagccactgagcccggccttaagacatttttcttacgaggtattttttagcccttagggaaatttatcatgaaagcaatagagttcagagcaagaactctggaatcagagctcatatttgattctggataaaacctgaagagttatataaccttggagaagctaactgccattttgaaccatagtttcctcacgtgggaaaagggtttcatgttaatatatataactcatggattataatgaagactacatgacaa

SEQ ID NO: 502 - DNA, 387 bp, Homo sapiens
  misc_feature (1)...(387): n = A,T,C or G
cgttgctgtcgcaggtgggcatgaacgtttgtaaacacaccagcactgatgcctccacatgggtggccctggagaatgccccaacagaggtcaggacagctggggacgccgtctcagccctggtggccagcaccgccttacgtcaggaggctgcagtgccaaggacagcaagctatctaaacccccagtgtgtgcctcggggagctancanntataangcaccattaaataaattggttgtgcctggaaatgcaaggagggcaatagctttgtaaattgggttacatttttctccttgaatttttctatggtcctagagctttccaatcatttaatggcattgtcggatatcttttacatttcaattggcatccatgaaattacatg

SEQ ID NO: 503 - DNA, 354 bp, Homo sapiens
  misc_feature (1)...(354): n = A,T,C or G
ttgcccaggctgagagtgcagtgatgtgatactggcttactgcancctctgcctcctgggctcaagagattctcctgccccagcctcctgagtagctgggattataggtgtacaccaccacgcatggctgcttttttggaatgaaaaaaaagatggccataaacatagcctgtaggtccttccacttctcgtaacccaacctcctgaacccctagcattaaagtgggtcttcagaaaaaagggcagccattggggaccctcagaaaaaaagggattttcccttttcttttattaacaagaggccggtccccttggagaagagcaggttcgccttcgagggccgcgatatcgccg

SEQ ID NO: 504 - DNA, 350 bp, Homo sapiens
cagttactcacaaaagaccacgtaccaaaataattgcggccttttccattaaatacaataccctataaaactggaagacaaactgggcttgtgatttccagcccaaagaaataagatagccagatgcttctggcctgtatagcttatggattaacacatgcgatgtcaagatattcacccagactttgaacaccattaaaaataacatcctttttttgtaacttgaaaggcacagatgtacggagcctctgctttgcccccactacctgacttattgtaaacgcctttcttacataaacatgcatcacttaacatcagagatacattctttgagaaatgtgaagccaggc

SEQ ID NO: 505 - DNA, 346 bp, Homo sapiens
gaagtggaggtggcggggagcctagattgtgcctttgcactccagccagggtgttaagagtgaaactccacctcacaaaaaaaaaaaaaaaaagcccctttctaaaaaacgccctggaacttaaggatttttacccgaaagcctttggtcttttacccacccactaagggtcttttcaataccccctggaaacccttgggcttctgggaaactggatgggaaacacatgtttggggaaccttgccccaaaagcaatatttctcccaaaagttcggggtggccaaggactttcctttgcagaaaattaatttgttattttataaaagggcccccggtggaccttgtt

SEQ ID NO: 506 - DNA, 382 bp, Homo sapiens
  misc_feature (1)...(382): n = A,T,C or G
cgttgctgtcgggagatgctggtcattctggagaagctgcggaaagtaacaggcaacgagatgctgggcctcgaggagggggaccttgaagacgacttcgaccctgcccagcacgaccagctcatgcacaagagctttggggacgagttctacggggccgcggaggaggagaagccacaatttgaggaagaagaagggcttgaagacgactggaactgggacacgtgggacgggcctgagcaggagggatactggagccagcaggagctgcactgtgaggaccccaacttctacatggacgccgactacgaccccagccagccgaggaagaaaaagcgcgaggcccccttgacgggcaagaagaaacgcaagtcccccttcn

SEQ ID NO: 507 - DNA, 395 bp, Homo sapiens
gtccgttgctgtcgggctcctgttgcaatatgaggctgatctggaagctctggggggggggagattgtccctgctgtcttttccagctattgggtacagcattttgggcaggagaatctaggaccatgccacatcaggtctctccttaacccattccattcgactgttatcacagctatgcttccagagtgctctgcgcattttcacgatcagcaaacaatgagcaaatctctgttctggaagctgggaagtccaggatcaaggcactgtcatctggaacctgaggagagacttcttcctgcatccttacatggggggagacaaaagagtggcagagaatgaatatactcccagcccattcgagagggaagagccctcacctcatcactttcctg

SEQ ID NO: 508 - DNA, 386 bp, Homo sapiens
cgttgctgtcggcggcccacattgtccattattcaactgcacgtgtgtgctgcgtgcttcacatcctctattgagagttacagcaagtgttaaacgaggtgagttcacataacaggaattctggaactgcttgaaaactaggacgattgggcaatatcgggcttaactccacctgatggcaggtgacccggatagaaaatggccctgcgtttagccaggatgtggctctccagcttggcttcagtgtgatcacttggcagtgcgctttctctttcgatagtgaaatccttctctatacctatgttttgctttggttcttaaggtgggaaacagaatgggccacggaggttgagtgactgaagaccaagggttggtgcagcctcctc

SEQ ID NO: 509 - DNA, 356 bp, Homo sapiens
aaggctgttgtcatgtggcagagagaaagccccttatgcgcgttaggggccagaagttggcgctggtgtttgtgcacggctgtgagtaagcgcgtaataaataaatcagaacgagatggacggagaccatgcgctgtgctttcatcctgctcatcccccagctgaggaggtttctgacccccatacccgtcctgcagccttcgagcaaatgtgtggaaaggaaaataacccatatcgaaatcagaacaacggtgttttaaaaatacgaattgagtctggccaggcgtggtggctcacgcctgtaatcccagcactttgggaggccgaggcaggtgggtcacctgaggtcaggagat

SEQ ID NO: 510 - DNA, 352 bp, Homo sapiens
  misc_feature (1)...(352): n = A,T,C or G
ctaatagacatccaaatgcagcctacttgcaagcaggagttaagtcagtttcactctcgtatcttgtatttgtgcccccagcccttggagcgtaatgagaaggagccggcggcagggagacaggaaccacaggactccactccagctgtggattctaacccagacctcttcccccacatccactaattcttcacagaacctttaaactgggtgtgggctctctgcaagtttcgctgtggtttctaagtccttagtggttgatccacttgacaactaatttttttaagttggtagctccctgcggtatttgacagtttttggtttggttttgtttttgagacagggtctcacn

SEQ ID NO: 511 - DNA, 298 bp, Homo sapiens
gaggcgggaggataagtcttaaagctgcgtttgcaaaacaagcatgtgtttactgggcggcataatagcttgggcagcttttgggaagagctgctacaatttgggagggatgtcagtttcacacctcccatcaaaggaaggtgaggaaatccactagacttacatcctccaggccaaaagctagaaagtgtccttttacctgcatgcttccaactgcgtgtccctgacgccctggtttcatggtgctcctgtacctactttaaggagactcaccccgcttgctcacgaacgaaagagg

SEQ ID NO: 512 - DNA, 348 bp, Homo sapiens
tttggtattgccggtattattgatggtaaactgactaaaatcatacatggaataatagaaatcaggcctaacatcagatagacttttccattcagttaagttattgtgtagcaaaatttattttgtcagttcactacacaatgtgacagtatatagtttctctaatagagtaacattaaagaggacatataatataaccaaaaatttgagttccagataagtttggtgtctcactagcaagatgacgttaaataactcatttaatttttttgaaaacttaattttctgttctgtaaaataaaaagcaatctgtctcttgtccaaaagactatgtaggttttttaaaaa

SEQ ID NO: 513 - DNA, 368 bp, Homo sapiens
  misc_feature (1)...(368): n = A,T,C or G
acattcatcaatgctctggaccatagcatggtgaggaaagggtagagcagctcagtgccccaaggcccagagcctgccaggccaggataggagagcatcccatggctggaggagccctggggcagccactgccctctgcctcccatagctccagacacaaatcaacagggctggcgggcctcccagtgtatagcctagggcaggataggggagtcactggcagccaggctttctaagccagagggcccttggagatctttcactgttgtttcccatttacagtcagtgaaactgaggcccagagagggaaagtaactttcccaaagaaacacagcaactgagtggcacggctgggattgtaactcccn

SEQ ID NO: 514 - DNA, 349 bp, Homo sapiens
cacatacgcgtttctatttttcttcctctcctcctgatctccttaaaaatgaatctagagttggtggctttttccccctcctctttggccagttccacagttcagttcttcctgaaaacagggatgatgaacttgtaggatcaggacaaatgtgtgtttttcaaaaacttaaggctgggtgtgaaacaccttctgtggacaaggatttgtaaacttctctcctccctccagctgcggccccagcctaactgatagttacttgattcagtgtgctagacacttaaatagcatctatgtctctttcaagggaatttgtcaaataatgcgtgttagctaattgttgcaagca

SEQ ID NO: 515 - DNA, 349 bp, Homo sapiens
  misc_feature (1)...(349): n = A,T,C or G
tccattgcagggtatcgccaggtgccttgaacttcccgaggcaagaagaccctggagacaggtagcagggtggccagggctggggtggcttcaaaactcacagacaagcagatgcttcaagtctgggaagcctaagcccaggtggctgcaattctgatgtcacctagataagccactgtcaactctgccatccccttccccaggctcagaggctgaggacagagaagctggggttgtgccccagntctttctagtaagactcaaaggacaaagggtgggcccagggaacatgggtgaccctggcctcatcctcagtgcccattgcttgcagggcaagggctccagcttg

SEQ ID NO: 516 - DNA, 383 bp, Homo sapiens
cgttgctgtcgattgagtttaaccatgttccaagagaaaatacaattaatgaatagtcacaaggttgctaatctgatcaatgccgggtgataggacatttaatctgattgtctgtgactgcaattgcacagagctttggcagccaagaggaccgccctggctggcaagagcgtttgtagtctggtcactccttggggtggaggtggggctggggagctgtgatgtaaacagatgtggggaggagagaaggcgcccagagcatgagaggaactggctgaaaggatcgaacacagggaggtgagcccacagaaagtaggtacctttcatgccaggaatgggagagacagccccatttttttttctgagacagagtctcgaagtgg

SEQ ID NO: 517 - DNA, 361 bp, Homo sapiens
cctaattccctcacaagcattcagtccctccaccctgaggtggtgaaatccctgcaggcatttataagtatacctggacagaagaaatacaagataccgttctattaactcaatatagtgttgctaagttcgtacttttgctttggttattttattttataaataggtatcactcgcatggttccaaatgcggtaggcacagagagtatatatgatggaattacatgctccttccctgcactcagcaaccgagatattcccgctacgggcactcaaaggtttcattgtctgaaatatcaggctaaacgtagttcatggttaggaagcaacaaccgtaaataatccccatccaaacggaggg

SEQ ID NO: 518 - DNA, 365 bp, Homo sapiens
gggtgaagcaagtaaggagcataccttagtcacagcccggcccttggtgaatgggtgtactataaactaaatctgcctgccaatcatgggacaaggcagaacacttgtctatctctgtctaagctcccctgaaaatttatgaagagatgtccgctcgcacatgagtttgagactaaaacttatgtttcctaagtaaaacccacatcaggaaaaccctagtccagtaaaatccaataacaagaacttctcttatgttggtaaaatccgtggttgcttgagagaaacaagagagaaataaattatctctagagaatttaccaaagaaaatgaaccttaatccttgtctcataagatttctatagaaa

SEQ ID NO: 519 - DNA, 396 bp, Homo sapiens
ggcacgagcggcagcagcgcatttggcttttccacctgctggtgccctggaggctctgagccccggcggcgcccgggcccacgcggaacgacggggcgagatgcgagccacccctctggctgctcctgcgggttccctgtccaggaagaagcggatggagttggatgacaacttagataccgagcgttccgtccagaaacgagctcgaagtgggccccagcccagactgcccccctgcctgttgcccctgagcccacctactgctccagatcgtgcaactgctgtggccactgcctcccgtcttgggccctatgtcctcctggagcccgaggagggcgggcggtcctaccaggccctgcactgccctacaggcacttgagatacctgcaaggtgtg

SEQ ID NO: 520 - DNA, 354 bp, Homo sapiens
  misc_feature (1)...(354): n = A,T,C or G
cagcaggagatctgtccctgcttcaatccacgagaagcctcacaagtgtctggagggagaaacgtccttgaggacagtaggaaactactgtcctcagccctggaaactgtgctaggtaactcagacaaatcaagtggccgttcagcagcatcacactgcaggaagtatgttccacaggtcccttgggcacaaacccccagccaaccctcccacactgctgggaaatcccccttaggactttccctatttaggacagggcagtgctctgatgatttactagagccaaggccaacctgggttatagcaccacctattgccgaaaagaaggcagcaacctaggagaaaaatttanan

SEQ ID NO: 521 - DNA, 265 bp, Homo sapiens
  misc_feature (1)...(265): n = A,T,C or G
cgatatctggaagggcagggacatgagctgggtggggggcaagtaggacctccatcagtggggatatgactcagctgtgagaagggacagatggagtgcaggtccagccaggggctgcagtggggctggggtccttagagctcagtatgagcttcagcacgaggtgggccttgtgtgtgcacgtangtccttcccggaaggcatctccagagtaaaggtcatggtcaggaatagttcatgattggagactgaaactgcacatagg

SEQ ID NO: 522 - DNA, 378 bp, Homo sapiens
cgttgctgtcgcaccctgatggagacagagggggacagcccccacccatctgtccccggcagggctcttgctctcacagccccctggaacaagccccatgccccaaccttgggcctggctactggcccagaaggcaccaggcctcatgagaatgctgggggaccccaaagtggggggtcccataacctgacctcctggggctacacctcatgcctggacaagacgctgtgggctgtccgggccttgaacagccctgcagctgcacccccgatcctgatacctcaccccattcactgccagcatgctaaggctactggcgggcatcctctctgctcaaaattatagacctgtctccctgacacacctgctgtgccctct

SEQ ID NO: 523 - DNA, 344 bp, Homo sapiens
tgaggtgccctgccaggaccctgccagctcttgttggacagggaccgcctctctcctgcccattgaccccagggccagatgtgggacagaggaatgtgcatggtgggggcctgggcttctccgtgtgtgtcctgtctccttccagcttcttagacgtggtggcccagagtgcttttcagtgcacccgagccatgatgagcgagtggctgtgatgacccacgcagccagtcctttgtgcaaggaggggaagggagggccctacccgtattcaagctcagctgtcggcactgtggtttcttgcaccctcttaaacctgagactccccctctgattgcagttgaacg

SEQ ID NO: 524 - DNA, 348 bp, Homo sapiens
ttcattcgctcgccaccacagaaatccagaaacgaatatatagcaccagaatttttcaccagcaacaacccagaactcaaatatgggatgaaacaattcctggagccacaaaaaagtggagaaactccaagcagataggaaaagaatccagactcccacatccacaatgcccctcccccaaattcttcccagcgccaagcacacaggaaatcttccctcaattcacagtttatgtacttgaaaaagagagattgagatggtcaaccggcttccccaccttcttgggttcccagcaggagacttgtccttgctttaacccacaggaatcatcatgactgagtgaaggaa

SEQ ID NO: 525 - DNA, 378 bp, Homo sapiens
cgttgctgtcgggaagaagagccaaccaatcacaccagagcttccaccgacagcagaggggacgtaacacaccttctttcccctccggctttccttccccttctctcccgccttctccttattcataccagaagcgcctcagctctgattggctggagctctgtgctatctcagccaatcacaagccgggctgtgctcctacaccatccgaagagcgaatcgtgcagagaccgtgtctacgattggcctctccctgacaaggatttaattttgaatttttctttatggcgtgggagaggccacagcccggactccatcgactcccccggctcttagactaaaatcatgcccaagttcaaacaacgaagacgaaagcta

SEQ ID NO: 526 - DNA, 349 bp, Homo sapiens
  misc_feature (1)...(349): n = A,T,C or G
acacccagaaaagcccgttccaagctcgggaagttgcagaggagaaaacctggagtctagcgtcctggctctgcctggtgatgggccagcggcccgtgcccagagaaacccactggaggaggatggagggcggccctgcccccgggacagaccagccttgaccggagcgaaggagggagtgcgccacgcaaagcaccacaggcggcgcgggggccttccctggaaggccaggctcctttccaactgggctgcctctcggcttcaacgtcctaaagcggggacggctgaaccccggncatggctgacttgactccacctcggaatacttgatagggttcgcctatcgctc

SEQ ID NO: 527 - DNA, 394 bp, Homo sapiens
  misc_feature (1)...(394): n = A,T,C or G
cgttgctgtcgccagagttgcgaggagttttttaactgatttagccaggtggcaatcatgagtgaatggatgaagaaaggccccttagaatggcaagattacatttacaaagaggtccgagtgacagccagtgagaagaatgagtataaaggatgggttttaactacagacccagtctctgccaatattgtccttgtgaacttccttgaagatggcagcatgtctgtgaccggaattatgggacatgctgtgcagactgttgaaactatgaatgaaggggaccatagagtgagggagaagctgatgcatttgttcacgtctggagactgcgaagcatacagcccataggatctggaagagagaaagaacagcctaaagaaatggcttgagaaan

SEQ ID NO: 528 - DNA, 282 bp, Homo sapiens
ctccccttcacatctggccagctgccatggggcctagctcaaagaaggggccccctcccagggccagcttcaggatctgatcctgccccccagctctaccccacaccatactatgctggcctcgctgagtcacatgtgcaggtgcccctcccctcaaacacctgtgacctcccagcctcataccaagtctttggctcttctgagacccctagcacctgttgacgcaactgtgctaatgagctgggaaagcttccccaaccccgtcccacataaggggggtgg

SEQ ID NO: 529 - DNA, 396 bp, Homo sapiens
cgttgctgtcggtgcggcgtctgatttctttgtgctaacctggcagctgtggggcccttaggagccccccaccgagggtggacacagtccctttccttcctgcagatgcctaggcaggaggagggcttcctgcctgtttggcaaagtcccaggcagaggccaaggatgaggcctgactcggctcctccctccacatcagccagggcatcagaagttgggccagggcggggccttccctgctcgattttggacgaggcctaagtaaaccccctatgccctgccccagacctggctctttcctaaccccctcaacggtgggaggaactggcaaaaggtgcgcctgggcacaaacttcccggatctaaaggcccctttcagattttgaccaaaggggcg

SEQ ID NO: 530 - DNA, 389 bp, Homo sapiens
tactacggttgcgacatgacgacagacggtgacgggtgcgggcagaccacagctggattgcgctgcgaaaagagctctatttgggacggctgcgatgctactgctgtatgtgtcgcctgtatgagctcgactaaacgggtctggctgcgacaatacgcactgattgtatgttttgcgttcagacgaaggagggggacggctttgttgagaattcccacatctttgggttcagcttggcattaaagagtgtagtgataaattattgatgttttttatgggaacggggagggcccgcacaaacgtcatgtacttgctatcctgatctactctagttcttttgtttttcaggtgaggaaactaaaatctactgaacttagtctataataagc

SEQ ID NO: 531 - DNA, 385 bp, Homo sapiens
  misc_feature (1)...(385): n = A,T,C or G
ggcacgagatgccgagcaactgtggcctggaagagaaaattgccaacctgggcagctgcaatgactctaaactggagttcaggagtttctgggagctgattggagaagcggccaagagtgtgaagctggagaggcctgtccgggggcactgagaactccctctggaattcttggggggtgttggggagagactgtgggcctggagataaaacttgtctcctctaccaccaccctgtaccctagcctgcacctgtcctcatctctgcaaagttcagcttccttccccaggtctctgtgcactctgtcttggatgctctggggagctcatgggtggaggagtctccaccacagggaggctcaggggactggttgggccagggatgan

SEQ ID NO: 532 - DNA, 392 bp, Homo sapiens
ggcacgagggtgtgtctgtgtttgagatgaggctgtcgtctttcaaagggtgtgtccatggctgttatccatgtagctatgtctctgtgtgaaggtgtggctattgtctgtgatgacattgcctcggagagtgcatctgagggatctacaagactgtctgtgtccaagagtgcagctgttggcggtgagcctgtgtgactgtggctgttgccttagagtgtgggtgtgtgggtattgcacagagggtgtatctgtgtgcagtggtgcatccgttagggtgtgtgggaacatgacgttgtctttgagagtggtttcatgagggttatttgtaagggtgtgactgttgcctgagagagtgctcgggtggtctttgcgaaactcggtgcctgttg

SEQ ID NO: 533 - DNA, 381 bp, Homo sapiens
ggcacgaggcccccttcaggctaagtttcatgcagggacagacccagaaagaacacagtctgccctcagagagctctttgcagtgtagtgacactggggtttctgcagtcagggaggagggagggtggccaggctgacagctttttgcaagaggagggggaccagcaccagctgggaggcataggctaggacaggcccacgtggaggctgggcaggaagggcctgctgaggtcacacagctgttggtggttgggccagggcggcttcctcctttcagaatgctagggtggctctcaccactggccgcctctccttgccaggcctgccaactcaggggacagatggagcacgagtggagaaagggaaaggcaggtctggtgt

SEQ ID NO: 534 - DNA, 387 bp, Homo sapiens
cgttgctgtcggacatcgcaaacgtcgcaggacttccagcaagtcggaggcaggggctaggggtggaggccagggttccaaggaaaagggccgagggagttggggaggccgccaccaccaccaccacccactgcctgcagcaggcttcaaaaagcaacagcgcaagttccagtatgggaattattgcaaatactatgggtaccgcaatccttcctgtgaggatgggcgccttcgggtgttgaagcctgagtggtttcggggccgggacgtcctagatctgggctgcaatgtgggccatctgaccctgagcattgcctgcaagtggggcccgtcccgcatggtgggcctggatatcgattcccggctcatccattctgcccgccaaaa

SEQ ID NO: 535 - DNA, 386 bp, Homo sapiens
  misc_feature (1)...(386): n = A,T,C or G
cgttgctgtcgctgaagcagtggatccagggcgggaagcaggagacacagctgctggaagactacgtggaagccatcgagggtgtcagaacgcacctgctgcggcactccgagcccagtaagctcacctttgtgggggagcttgcccacggccgcttcagtgccaagatggaccacctggtgtgcttcctgccagggacgctggctctgggcgtctaccacggcctgcccgccagccacatggagctggcccaggagctcatggagacttgttaccagatgaaccggcagatggagacggggctgagtcccgagatcgtgcacttcaacctttacccccagccgggccgtcgggacgtggaggtcaagccagcagacaggcacaan

SEQ ID NO: 536 - DNA, 364 bp, Homo sapiens
aataaaagtttctttaaggcagataaagttacaatgctgtggaataaaaaagctactgctgtgttggtaatagctagcacagatgttgacaagacaggagcttcctactatggagaacaaactctacactacattgcaacaaatggagaaagtgctgtagtgcaattaccaaaaaatggccccatttatgatgtagtttggaattctagttctactgagttttgtgctgtatatggttttatgcctgccaaagcgacaattttcaacttgaaatgtgatcctgtatttgactttggaacctggcctcgtaatgcagcctactatagccctcatggacatatattagcattagctggatttggaa

SEQ ID NO: 537 - DNA, 389 bp, Homo sapiens
ggcacgagcagcaacaagttcatgctggttctggccagcaaccaaccagagcagttcgactgggccatcaatgaccgcatcaatgagatggtccacttcgacctgccagggcaggaggaacgggagcgcctggtgagaatgtattttgacaagtatgttcttaagccggccacagaaggaaagcagcgcctgaagctggcccagtttgactacagggaggaagtgctcggaggtcgctcggctgacggagggcatgtcgggccgggagatcgctcagctggccgtgtcctggcaggccacggcgtatgcctccgaggacggggtcctgaccgaagccatgatggacacccgcgtgcaagatgctgtcccgcagccccagcagaagatgg

SEQ ID NO: 538 - DNA, 393 bp, Homo sapiens
  misc_feature (1)...(393): n = A,T,C or G
cgttgctgtcggatagtgatgggggtgacggtggaagcaggtcaggtgaaacaggggacacccatgtgtgtcccaagcaaaaattttgttgacatcggaatagtaacaagtattgaaataaaccataaacaagtggatgttgcaaaaaaaggacaagaagtttgtgtaaaaatagaacctatccctggtgagtcacccaaaatgtttggaagacattttgaagctacagatattcttgttagtaagatcagccggcagtccattgatgcactcaaagactggttcagagatgaaatgcagaagagtgactggcagcttattgtggagctgaagaaagtatttgaaatcatctaattttttcacatggagcaggaactggagtaaatgcaatan

SEQ ID NO: 539 - DNA, 395 bp, Homo sapiens
tgggacctcagggccacactgaacgccttcctgtaccgcacgggccagcacagcaacaagttcatgctggtcctggccagcaaccaaccagagcagttcgactgggccatcaatgaccgcatcaatgagatggtccacttcgacctgccagggcaggaggaacgggagcgcctggtgagaatgtattttgacaagtatgttcttaagccggccacagaaggaaagcagcgcctgaagctggcccagtttgactacgggaggaagtgctcggaggtcgctcggctgacggagggcatgtcgggccgggagatcgctcagctggccgtgtcctggcaggccacggcgtatgcctccgaggacggggtcctgaccgaggccatgatggacacccgcgg

SEQ ID NO: 540 - DNA, 396 bp, Homo sapiens
ggcacgagggacctcagggccacactgaacgccttcctgtaccgcacgggccagcacagcaacaagttcatgctggtcctggccagcaaccaaccagagcagttcgactgggccatcaatgaccgcatcaatgagatggtccacttcgacctgccagggcaggaggaacgggagcgcctggtgagaatgtattttgacaagtatgttcttaagccggccacagaaggaaagcagcgcctgaagctggcccagtttgactacgggaggaagtgctcggaggtcgctcggctgacggagggcatgtcgggccgggagatcgctcagctggccgtgtcctggcaggccacggcgtatgcctccgaggacggggtcctgaccgaggccatgatggacacc

SEQ ID NO: 541 - DNA, 319 bp, Homo sapiens
tattattctcattggctgcggtagatgaggtatttttaggccttacctaattcatctgtaaaaaataagttaatgttttttgaatgcctgctactggggccaagggttagacgtagctcatctcagtgtcctctaccaccttacagggagagaataccgtttgcaaataggggcccaaaaagatcactgtgctggcccaaagtcacacagctgataagtggcagggcagaggcctcattgtgcctcccagtacaaagatagcagtctcttcctgcattacagaattgtgagaatgagaagataatgaaccagaaagcac

SEQ ID NO: 542 - DNA, 301 bp, Homo sapiens
atgcctggctaattttttatttttagtagagatggggtttcaccatgttggccaggctggtctcgaactcctgacctcaagtgatctgcccaccccagcctcccaaactgctgagatcacaggtgtgagccatcgtgcctggcctgtttaatgaatttctgactggaggcttaatttttttgtttttttcacagggtctctttgagaggatgacagtgggaagcgcctactgtggctgttgcggctgcaggcctggctccttccactctcgggctgcccttcacggtgccaggtttgtggg

SEQ ID NO: 543 - DNA, 340 bp, Homo sapiens
tatttttgcgtggaatataataatatctgaaacctccacaggtcctttatacataacattctacctacaaataagagtcactacacatgtgaagcagcaatgtcatatgaccaataatcaagaggggaaaaaaaaagcaaaacaagcaaatagatgatctgcataattgaagttaacagacaagaactttaaaacaaccataattgggacttctggatagctaagggcataacagctgcaccatttagctatatgcctccctgtatttcctccctaaagaattaaaaccaacaaaaaatggtatgtaaatctagacgaaaccatgccttcggcataactt

SEQ ID NO: 544 - DNA, 328 bp, Homo sapiens
ggaaaaaaaagcaaaacaagcaaatagatgatctgcataattgaagttaacagacaagaactttaaaacaaccataattgggacttctggatagctaagggcataacagctgcaccatttagctatatgcctccctgtatttcctccctaaagaattaaaaccaacaaaaaatggtatgtaaatctagacgaaaccatgccttcggcataacttgaagacagagaatgctaaaatattaaaatgaccgtgactaggctgggcacagtggctcacacctgtaatcccagcactttgggaggctgaggcaggtggatcacttgaggccag

SEQ ID NO: 545 - DNA, 324 bp, Homo sapiens
aaggcagcaggtgccagtgtcagtaaaggccctgcctggctcccttgctgagaatccaggctatgcctgagctagggtgtgcacgtgtgtgtgactgtgtgtgtgtattgcaaaacaaagtttcttgggtttagctagatttcattttaccttctgagtgagcttgtattttccatggaaaatggacaattctttcttttccataggtcaggaagctgttcctgcattctttgggaccagaaaaataattttcatttatcttctgtcattatctgactctttcctcctaaatctcatttacactgatgtaaatgtaatatttta

SEQ ID NO: 546 - DNA, 333 bp, Homo sapiens
tcattacattattttccttgtaattaatttgctaaacggaggtgaacaaagtagtcctaaactaaaatttatttaccatttctcctttaaatacaaagacaaatatgatctattcatgacattataccactgtttctgttatttcccatattaacttggcgtagttgtttaaaacattcttttcttctttgtagatgaagaaaatatgacagtgaaataacgattactattgatcagtcatagttgtttaaaataatgtctaatgggctgggtgcggtggttcacacctgtaatctcagcactttgggaagccgaggcgggaggatcacgagg

SEQ ID NO: 547 - DNA, 341 bp, Homo sapiens
aacggccaggaatgctcacaaatatagtgacagtaatggtgtcattctgaggccttcgcctcaaggcagggcttgaaaggggataaagtctaatggcactagctggcatttcaaattctagatgcctgaggcagactggcaccgaaacagctcctcgtttctctcaaagtgaacatataattcatagagggttaacaaaataatatcgtgaagtttttcccctttaaatctctaacggtggcggggcgcggtggctcacgcctgtaatcccagcactttgggaggccgaggggggaagatcccttgaagtcaagagtccgagaccagcctgggcaacatcg

SEQ ID NO: 548 - DNA, 332 bp, Homo sapiens
gtctgatcatatatcctgatttttaggtaagaatacatagccatgacagcaagagaatatctctgcagcttctgatgtacactgaagagcaaaataacttaagacatgtaaagttaggtgcctcaaaaagtaaacactgcatgctcccaaggggaaaaacaattctacaaaacagagagttaaaaaaagagaaagaggccgggcacagtggctcacgcctgtaatcccagcactttgggaggcgaggcaggtggatcacaaggtcaggagattgagaccatcctggctaacacggtgaaactccgtctctactaaaaatacaaaaaattagg

SEQ ID NO: 549 - DNA, 328 bp, Homo sapiens
ctgtgttgcaggcataaacccaagtggcttttaaagatcagctgtgattaatagtagtcagttggaagtcagagtcatcagtttaaaatttagctcaacaaatggtggcttgcttggtagttcctgtgtttaacattatttttggaagaaaaagaaaaaaaaggaaggtagaggaagggagaatgttttgattgttttctaatttattgatctctcccttgcatcatcaccaagactgttaactggttcccagaatgttgtgggttgagcttctgtgctgtaatgtggtttgatttttttagaggggagataagggtatctcctgtct

SEQ ID NO: 550 - DNA, 319 bp, Homo sapiens
gagaactaagtattttctctgcattagccataacacatattattttaattaaggtttctgtttttttaatcacctcatggaaacactgagtctaggctgagatgggggcctttagtattggatgaggctcacttatgcccactagcctttatgtaggtatgttttacatttcttaacatgcactcatttaagtgtatgattaaatgactttcagtaactttagtgagtggtacaaccatcactagaaatcagttttagaacattttatctcttcagtaagatatttgtgactgtttacagttaatccctgttcttacct

SEQ ID NO: 551 - DNA, 332 bp, Homo sapiens
tctgctatcctacttgagcttctgtatccacttgtggtaccacatgcttcacagtgttttgtcatggtttatttacatgacaatcaccagtagaagtttggaagatttttgaagataggacactatcatcatcattttgaatctctactatctagtactaacccacaaataacaagcacttgagaaatgtttgagtgcctgagtggatcagctttccacttggtaaaactttaggtaaatttcatcctgttaaactggtcctgtgtattagccgctcacttaccaccatttgtctctctttcacatcaattggtgaatagaaaaatggctct

SEQ ID NO: 552 - DNA, 177 bp, Homo sapiens
cacttgatgcatatactaaattttctttgatcaattttaagtgcctcaatttttagtccctttaattagaaggtagccagtatccagtaccaaaaattgagaacactgtttcctgatctaaagagttcctttttactgttcatgcttgctccaaagatatttttctcatactgatgg

SEQ ID NO: 553 - DNA, 328 bp, Homo sapiens
  misc_feature (1)...(328): n = A,T,C or G
atgacctgacaatttcatatacaaatacattgtgaaatggttaccacaatcaaattcatgaatatatccatcaccacacatggttaccatcctttgagttttaaggtgaattaatggaatgcgtgtcattcatatgcatattcatatgcatgtcatttgcataccattccttgactcaagaaagttgctatatgagtgaaagataattattgatcatatgaacttaagatacaattattctcatctggccaggtgcagtggctcacgcctgtaatcccagcactttgggaggcagaggcaggtagatcacttgaggtcagaagtttgn

SEQ ID NO: 554 - DNA, 335 bp, Homo sapiens
  misc_feature (1)...(335): n = A,T,C or G
cccactgaaagttattacaaaaaattgtgcagagtaaatcaactaatcccagtgaatcaactaatccaaggctgtgatcattttaataactctccacaaaggctcagaaaatttctccacccatgaatttcttctacacagctgtgattataatgtgatacaaaagcaacatccttcagctagtgcagttgccaggagagagtggcagagccgcagagtgtggggtagaccctacatttgaatccatcagcaagccgtgctttctgcctctcaacacaggcacagcaagagtctttaaaggagaaagacaactgcggngcctggtaaaccgaaat

SEQ ID NO: 555 - DNA, 329 bp, Homo sapiens
  misc_feature (1)...(329): n = A,T,C or G
cttagcacaacacagaaaagctttaaacactcttacctttgactggaattacacacacacacacacacacatacacacacacacatacacacacacacactaaggctttcccacaaagccatgatgcatccttaaaaataacacacagctctgaaaagtgaatgtcgggggtgaagagagccctcctacactccttttcctagagatgacaaggttgtgggggcatggctgactgtgaggagcaaaaaatgagagggagatatcattttacttctttgtactgcnataataaaaagaacagatagaatggaaggaagaggccaggggca

SEQ ID NO: 556 - DNA, 229 bp, Homo sapiens
atttttttaatttaatatgttacaaaatagctgtagtatcatatttttaattgatggatggatttatccacatgaacgacatggcataatctatgcctaatactctctacccagctgggcattgttgactattcaatgtttacgaaatagatcccatccctacttgactccagaagtgctattttctaagtacatgttgaaaagtataatttcaatcagtcaagaatcc

SEQ ID NO: 557 - DNA, 267 bp, Homo sapiens
gcccacctacagtcctggcagaattggacttcagcagaaccggggtcctcccttttgttggcctgtggggaaacacttctgatgggcccctttttgtaaggttgcaagtagtcacatgaatactatcagccacactggccagatcaggggacaatcctatgtcctgggacttgaaacgttcttgtccacgtgtggcgcttggtgactaccatggccagggaccagcaggccctgtctgccttcagcctagagcagggctctgagccg

SEQ ID NO: 558 - DNA, 338 bp, Homo sapiens
tccaagtttccccaaacatcttacagtttaagtgagggtaaccattgatagactatatattgtaaaaagatactagtacttctgaggaaatttacaattcagcaacacaacttataaaataccattaaaatgctgtcttctattcatactgcgaaaacctatagagctattttgaaaaaacaaaaaccaagaaagctctttatgtccttgacatagtaaggtctctaaatatatagcaaatagagaaagggagatcagtacagtgtgtatattatgacaccatttgtaaaacattatctgcgttcatcattttcttatatatgtataaaataactcag

SEQ ID NO: 559 - DNA, 325 bp, Homo sapiens
gagaactaagtattttctctgcattagccataacacatattattttaattaaggtttctgtttttttaatcacctcatggaaacactgagtctaggctgagatgggggcctttagtattggatgaggctcacttatgcccactagcctttatgtaggtatgttttacatttcttaacatgcactcatttaagtgtatgattaaatgactttcagtaactttagtgagtggtacaaccatcactagaaatcagttttagaacattttatctcttcagtaagatatttgtgactgtttacagttaatccctgttcttaccttgaggc

SEQ ID NO: 560 - DNA, 336 bp, Homo sapiens
tcatctttgtaatatctacatgcccagtacctaatatatatttattcaatgtgatatttcttatcaattcatacctgagaattcacttaactttgccatcacatgagttctagcaagcaggaatatacagtgattatgcctagaattttaaacatcagatctgacctaagaaataacaatcccaactgtaagaaagaagtggtttggggaagtcaaacactaaagaaatactttcaaaccagtctaaaactaactaaatggttaatcttatattaacaaaaacatgcaacctagattaacaaaagcatacaaatctcaatttcattatgtgcattt

SEQ ID NO: 561 - DNA, 323 bp, Homo sapiens
actaaaaatacaaaaattagccggacgcagtggcacgcgcctgtaatcccagctactcaagaggctgaggcacgagaatcacttgaacccgggagggagaggttgcagtgagccaagatcgtaccaccgcactccagcctgggtgacagagtgagactctgtctccaaaaaaaaaactttgcttgtatattatttttgccttacagtggatcattctagtaggaaaggacaataagattttttaacaaaaatgtgtcatgccagcaagagatgttatattcttttctcatttcttccccacccaaaaataagctaccatatag

SEQ ID NO: 562 - DNA, 340 bp, Homo sapiens
ggaagggtgagattttctactgcattagttgaggcaatattagctataacaaaacagatcaaatagtgtataatgactcattccaaataaacatttgtttttcatttatgtaactattgcaggttggtaggggactttctcctccttgcagatattttggaatccacctttgaagatgggaatacaacatgtgacttataagatttagtaaatagggaatacagagggcaaatggaaattcagtaggcaacaaatggtgtccaatgttataatcattcatgtgaagtttggtaaatatcccactccattgttttatagtctgaacacttgattttacata

SEQ ID NO: 563 - DNA, 321 bp, Homo sapiens
ataaaccatggtcatttttaggcatgtatcattcatttactcatagtttggtttacttaaattatcaggaatacaatgttgcaatgatgcttaaaaaacacttgttagttttccctgtaccaggcaatggttataattaaaatgatatgctgttgagaagccactcttaagagtccagtttgtttaatgttatgggcagctaccaaatttgggtgtctcttgtatattttttgtaagaatctcattttttatgcttgaaagatttggtgaaaagaatgtggttgaccataatttgcaacattgtcttattaaaaataaact

SEQ ID NO: 564 - DNA, 327 bp, Homo sapiens
  misc_feature (1)...(327): n = A,T,C or G
aagcccaaattttaatgcacttctgactttaaaacttgttatttcttatatatcctttgacctccttagaactgacatttaactccctaaaaaaatactagagcttgttagtcaggcaaactacatttactagacttactagtactctcattgaagaaacagtgagtatattagtccattctcacattgctatccagacacacccaagtctggngaatttattatttatttatttatctgaggcagagtcttgctctgtcacccaagctggagcgcagtggcgcgatcttgtctcattgcaaggtcgattctccaagttcaagggtg

SEQ ID NO: 565 - DNA, 193 bp, Homo sapiens
caaataccttctgtgcaaagatagactatgaataatgactttgttttcttctatttattcatggtcaggaaggacatattttccttccttactatcatcttgctgtcaaacttcttgaggttaacttggttatatagtcttttacttggaaaggagagtagttaaatctgaccaatttaattgatcagaaaat

SEQ ID NO: 566 - DNA, 334 bp, Homo sapiens
ggcgtctacattcacggcggtcactccgtttctgtctccttttgtttggcacctgtcagtggatggaagatgaaagtttcaaagctcatggtaacagcagggttctctaccccaggggtttctacctgtgtctggcagtgccttaagaggatgatccagaggcttcggaggagggcgacgtgggaaggagcaggtagcccaagctcccatctcccacccaatcgttcgggcagcttggatccacgtaacatcttgtcattctaaatatgtcagatttaacttggaaaacaaaaaaaaaagaattccactcctaaaaaattttactaagaaatat

SEQ ID NO: 567 - DNA, 326 bp, Homo sapiens
gactgtatctcattggggatacgaagctctacacacttgaagatggtgaaggaatataaaaatctatgtctcacagtccagacttggagtacaagtaataagaagaataaaacttaatcccttaagtagattcaccataagttagctcagagcaattccagtgcaagtatggtctgtgatccagtagtatcttacagacagcaagttgaacattgtgggatgcatgagctattgaggcctttgcagctttctgctacatggaggctagggccagagtcaagatttatgctttgcagcacactggtcagctgtttttgcaaatcaag

SEQ ID NO: 568 - DNA, 329 bp, Homo sapiens
aaataagaaaatgtaaaggactttgacaaatgtaccggctcagaacattctgagaagacaattttttaatgtaaaggtgatgattgaatagttggatatgtgcacgtttagcaaaaatgggttaggcacagttaagagtaggtattttattcaggaagaatagaaggcaactagatgggggagtttggcctgagttttgacatttgatagaaatgattgtgttttctttttttttttttttgagattggagttggtttttgtcctccatgttggtagtttttgggactttttcttgggttacacatcttctagttctctgtagtgtgag

SEQ ID NO: 569 - DNA, 337 bp, Homo sapiens
aaaacattaaatcttccctggggaaaggtacatcatccagagatgcaatatttaaaaagaatgccccgcattcatacaaacattatgaggcgtatcagaaataagaccaaataaccaaaaccataagaaaaaaagacaaggaaaactcacagacgattggctaatgagactatcacagataattttttttaaatctattattaacatgttcaataaaaagatgaaaagatggagaattttattagagaaatggaatatctaaaaatgaattacttgaagagttgctaaatgaaatgtagaataactgtaagtgaaagcacagttggtgtaacagcgg

SEQ ID NO: 570 - DNA, 330 bp, Homo sapiens
tgatagttaagatcaattaaccaattagttacccattttcatttttcctgtatattctttgtagatcacttactaaaatgattttctaagaccttcactttcttaagtaaagaaaaacaatttgactgagacttggccatttagctaaaatctaaaagacctatttaatttaaagtataagtcaagcagagatcttatcttctgtccataaataataagaatgattgtttttcgctaagtggaaaaagtgagatgaggcaagaagttgaagaatgcctagccaggtagcatatgaagcctacaagtttccagccgtgggtctgatgaaaa

SEQ ID NO: 571 - DNA, 185 bp, Homo sapiens
acgacagaaggggggctaccccggctactcctgctcagcatggctgctttagtgactgttctcttcacaggtgtccggaggctgcactgcagcgcagccgcttgggcgggcggccagtggcgactacagcagggactggctgccaacccctccggctacgggccccttaccgagctcccaaactg

SEQ ID NO: 572 - DNA, 339 bp, Homo sapiens
gaacatcacactccggggacagatttttttctaacctagccgcacaactgctctaaggttttatacagaccttctgcctcatcagcttccatctcatctcatttcatgctggatctaaaaatgactctgctgcaggaacacacacactgcctgacagggctatcttaagggcctttataaggaagcagatggccaggcacaggggctcatacctgtaatcccagtactttgggaggccaagatgggtggatcacctgatgtcaggagttcaagaccagcctggccaacatggtgaaacctcatctgtactaacaatacaaaaattaaccgggtgaggtc

SEQ ID NO: 573 - DNA, 331 bp, Homo sapiens
cctgatatcaggtgatccacccgcctcggcctcccaaagtgctgggattacaggtgtgagccactgcgcctggccaatactccttttattttaaaaaggacaagttagacactagtttgcatgcatagcttattgattatcctgcagtggggtcatagctccccatttgtgatgccggaagattgcctgtggaatcacaagacctcttccaatgttctgttatgctataaaaagaccagaacttttacattttaaattaaaagaatgtctgtgcatttttaaaaaataataaaacaaaaccagtagttgtggcagtagtagctggtagtgg

SEQ ID NO: 574 - DNA, 339 bp, Homo sapiens
gcatagaagctaagaaatagtaaaacttatgtaatcacattatgcttgggaaactgttttcttgcaaacaaaggtatttgtctcttatttattgtgttgatcatgaaaatagtatctctaccctgaggtgttacaaaaaattaatcaagtcagcatgtatactgcatatgtgtcttctggaatatttaccatttaatcaagaacctaaaaaatatataacctagctcccaaaaagtaacatcagtggttaattgtcaggttaaagaaaagtaaaataaggctgggcatggtggctcacgcctgtaatcccagcactttgggaggtcgaggtgggtggat

SEQ ID NO: 575 - DNA, 205 bp, Homo sapiens
gtgttcctggcccctagcgtggtaggtgcggggttgccagccccgctgggaagccccagccacaccccagggtgtttgctgctctgaggcctgggcctgcctgggtgctaggcttggggctaggggggtgagcgcggatgttttctaacgtgccttgtcacgcccactctagtgtgctggactctccctgagatcccgctgctgg

SEQ ID NO: 576 - DNA, 281 bp, Homo sapiens
tgtttgcatatacccaaattgacctcaaataactttccaaatggagtcttcaacagtaagttgaagtccaatattgacaaagcattaaccttctagtgttattttagcattggcctaatgttagcactttctataagacaaatttcagttactacatcatacctcattactagctgttgcttgaagtcaacatgttagtttatctatttcaaccttgtccagtaaattatatgcaagttcagaaataaaaaaaaagtatatactattcaatctctgagatc

SEQ ID NO: 577 - DNA, 189 bp, Homo sapiens
tcaattatgaaattactcatttaattgtattgaaatatgtgttatttaaatctctatctgtaacctacgggtataacaatatgtctatactgaggtaataatcatttaacctggcataatatcaattattttagaaaatatgtaactgaaaactcttccttttcataagagttggggaaacatctgatt

SEQ ID NO: 578 - DNA, 331 bp, Homo sapiens
cataattcagtttacagcaagaagataaattatttttgcgtggaatataataatatctgaaacctccacaggtcctttatacataacattctacctacaaataagagtcactacacatgtgaagcagcaatgtcatatgaccaataatcaagagagaaaaaaaagcaaaacaagcaaatagatgatctgcataattgaagttaacagacaagaactttaaaacaaccataattgggacttctggatagctaagggcataacagctgcaccatttagctatatgcctccctgtatttcctccctaaagaattaaaaccaacaaaaaatggtg

SEQ ID NO: 579 - DNA, 325 bp, Homo sapiens
ttgtaaaagagttcttgagatacagcactgaatgtaaaggaaaatattggagcattcaactacatttgagaaataacttctgtttattaaaagatactataagaatgaaagcacaagccctaatgaatattcttgtttgatactaaaccaaagcttgagaagtggtagtttcgcaagtttttcaagtggtttggtgcaatctgaagactgcaatcccatcaatgaactttatatctttaccctttaaaattataatttatgggccgggcgcagtggtttacgcctgtaatcccagcacttcgggaggctgaagcgggtggatcaa

SEQ ID NO: 580 - DNA, 333 bp, Homo sapiens
agtgtagtggcatgacctctgcctcccgggttcaagtgatcctcgtgcctcagccacctgaatagctgggattacaggcgtgtgccagctaatttttgtatttttagtagagacagggttttgccatgattgccaggcttgtcttgaacttctgacctcaagtgatccacctgcctcagcctcctaaagtgcactatttatggtgaggggttggttttgaaatagtccattaaggtgattagcatttgcttttgataaagacgatttacgggttggctgcttttgttttcatgggagataagtcccccacttctgctatggcttaaagtggtg

SEQ ID NO: 581 - DNA, 340 bp, Homo sapiens
tgaagattaagaggcagggattcaaggctgaggaagcaacatgcacaaacaaagttacaatatgacaccttcaaggaagaccaacaaggtagaaataggcctgaaattccaggtctattagacagaatgggaggagatcaaacagtaaacagattaggcagagtaggaggagatgaaacagtaaagtcagaggccagctcaggaaagattttaaaggccagtcaaacatggcacagggagccgtaaatgaactggtaaattaagatcacgggctctggaccatacagcctgagttcagatctctgttgccccacttcctatttgtgaggcctgggactac

SEQ ID NO: 582 - DNA, 315 bp, Homo sapiens
gatgctaaggtcaatgggagcaacttaggttaaagggtatctggagtgcgatgagcagctagcaattttaaatagggtgctcaaggaaggcctaatttaattttcatgaacagcacttacagagtttaagagatgacaagaggtaatatctgacttttatgagaaactctaaaaggataaatgcataggtaaaggctcaaacctaattttaataagtaagacttaaagaactaaatatgctgctatcagatgcttttcccctaacccatttattttaaattctatgcatatttatagaaatattaataatgtcac

SEQ ID NO: 583 - DNA, 336 bp, Homo sapiens
cgtacaagactcaggatgggcctacttccagctaccattcagtataggagagggaagagaagtgtgagaaagcccaaggatggatctgagggaggataacagaaaactaggttcctaactcaagatgagattaagttctcctttctagtatttattttgaagaagtcagggaatcaagaaaatctctgaacacttatataactgctgataagactgtacattagttcagcccctgtgaaaagcagtttggaggtttctcaaagaaacaaaaatataactaatattcaaccccagaatcccattactgggtatatacccaaaagaaaataaaatggg

SEQ ID NO: 584 - DNA, 341 bp, Homo sapiens
agagccaacctgtaactgctgatttagttactctatttagtcatttctaggtggagacctatatttttagccccagagactttcttccttctaaggtgggacaggaaaaccacgtgaaaggcgacatgctatcagaggcccagagaatctggagatggcagaaacttggacacatagaaaaacagggcgtttggggccgggtgcggcggctcatgcctgtaatcccagcactttgggaggctgaggcgggcagatcacgaggtcaggagatcaagaccttactggctaacacagtaaaaccctgtctctactaaaaacacaaaaaattagccaggcgtggt

SEQ ID NO: 585 - DNA, 331 bp, Homo sapiens
  misc_feature (1)...(331): n = A,T,C or G
gttataattttaagcaacataaacaagtaagaataaatattttagaagtgcgatgttatatttcttggtttaagtggtagattgatatatgttttctatcatactaataaacaacttgtaaatatcaaatgcttcataatttagaaatgtaaaacatgataatcaaatccaaaagtaatctaacacatttaaaaactaaacatatttaggccaggtgcagtggcccaagcctgtaatcccagccctttgggagaccaaggcaggtggatcacctgaggtcaggagttcgagaccagtctgaccaacatggagaaaccctgtctctactaan

SEQ ID NO: 586 - DNA, 337 bp, Homo sapiens
gagtctttccaaacacatccagtgggtcttcttttatttactcagctttttgtttgtttttcttttacaggaactataacatttactattggcaaactccaacaccatcctcagtaatttgggatgtctgtcaataccatcgttctgatttctgaaaattttcgctgaatgtgacatttttcctctcaaactaacccctccacagacacacccacacacacaccacacacacatgcatgcgtgcacacacagacacacacgcacatacacaccacatacacgcacacaaggcacatacacacacgcacacacacatgcacacacgtgcacacatacg

SEQ ID NO: 587 - DNA, 322 bp, Homo sapiens
gcatgcccctagggaggtgggtgtgatcagttttttaacaatttttaaagcttaaggattcattaggaaatttgaggcttgttataattggacagtaacatcaaaaaatcatctacagggagtagcttttttcttttttttttcggagatgaagtctaactctgttgccaggctggagtgcactggtgcaatctcggatcactgcaacctacgcctcccggggtcatgccattctcctgcctcagcctcctgagtaggggggactacaggtgcctaccaccacgcccagctatttttttttgggacttttagtaaagacagg

SEQ ID NO: 588 - DNA, 325 bp, Homo sapiens
tctcacttgatcctctcagcaaccccttgaggcaggtactaatgtgatctccatgctgcagatggggaaactgaggcccagggtttatagaatcaaaaggctggcacatggaattggtgaggatcctgcaggtcctcagcaggatgcgaggagtggcctcccagggacaggaagagccaagagcagcaggagtacagcagtgtgagaaagaaaatgccgtcagaccatgtgaggtggctcacgcctgtaatcccagcactttgggaggccaagacagaaggattacttgaggtcaggagtttgagaccagcctggccaacatggg

SEQ ID NO: 589 - DNA, 221 bp, Homo sapiens
  misc_feature (1)...(221): n = A,T,C or G
atgctagatgactccatcagccaatatgttagcattatctagaggccttatgtgaagtcctagtggtcctttccagttctatgactttaaacatacaggtgaatcaaagcttcaggaaggcctagaccaacagctattactgaagctcccatttgtgcttaggactatgcatagagaaactctcctttgggacttggttagggtccaaagccctaaggtcn

SEQ ID NO: 590 - DNA, 289 bp, Homo sapiens
  misc_feature (1)...(289): n = A,T,C or G
tagcaggaggtagaagaaaaagttattgaagctgaaatagtgatccttagccttagggacagtgtgtgtcagaggttagagcatccagcatggctggtggccagagctttgcatcagtctgagatgtatgtgatgtatctttagctcagggaagagagaggacttgatttttgaggaaggcttgggaaggagggatagaagagctggatagttttgctgctccccagccagaaatttatagtttgatttcattattgccttgaaatattgggatgtcccagaacacacn

SEQ ID NO: 591 - DNA, 340 bp, Homo sapiens
  misc_feature (1)...(340): n = A,T,C or G
cagtttgttcttaaagttaaactaatggggaaaaaaaacaggacagggaggtatctcaagttcatttgagccatttttaaaattttggtagctggtttctgtttttcttctttttaaaatagcaacaacttaagattttgtgtgccaccagcttccattccatttcataaaagcttaatctagcaagaattggtgagccctagtagaagttagaaagaaatgttgaagtgtgtatgtgtgtgtgtgtgcgtgcgtgtgtnnncccatcatactcaccttggacactttttaaaaaaacgcccttggctgggcgccggggcccccccctgtaatcccacca

SEQ ID NO: 592 - DNA, 315 bp, Homo sapiens
ccatggccaggcttgtgagctcacatcagaaatgaaattcagaagtcattcagaatcttaccaaatccagtttttactcttgatttaaaaatattttactttttaaaattaattattgtggctcgcccagacttggcagttagaattgaatatcaggaaaggttttaagacaaacctgacgaagaaagttgaagtagtcacagtatctagaaatacaagagggcctcttttctcaggcttatattttgagataaatttcctctccttagtacatgcagggaacatttcatttcataagtttgctgattaaaaagg

SEQ ID NO: 593 - DNA, 319 bp, Homo sapiens
aggacactggcttgccaaacaggagtctgggcacttagcagccagtgctctgtgcaaaccagccagtgctctgaattcagatgagagctttgtgtttgccttattggaaagcccttgattcctgggcttctagaggtatgtatcactcaaaatctctgcagttcttttagggtaagtgaacgctttacttcttcatctattagaaaattattctctcagcagggtgcggtggctcactcctgtaatcccagctcactcctgtactttgggaggccgaggcgggcagatcatgaggtcaggagttcgagaccagcctgac

SEQ ID NO: 594 - DNA, 328 bp, Homo sapiens
  misc_feature (1)...(328): n = A,T,C or G
ctgttgcccagactagagggcagtggcaccatctcggctcactgcaatctctgcctcccaggttcaaatgattctcctgcctcagcctcctgggtagctgggattacanncgccngnncagagcccaantaatanttggattgtttagtagagacggggtttcaccatcttggccaggcgggtcacaagctcctgaccgggtggagaagggcttttacgagtagaatgagccttttgggaggtggctgcctgcaattctttttttgattggattcaaatacgctgcttgagcttaagcaccttacgaacttttgaagatnttaaaggt

SEQ ID NO: 595 - DNA, 339 bp, Homo sapiens
cttaatcattcttacagtatttgagttgagaacatttataaagatttcaagcattacagtataaacaatatgagaagattcttccaaatcttttaacttgaatgcaattattagcatgcccctagggaggtgggtgtgatcagtttttttaacaatttttaaagcttaaggattcattaggaaatttgaggcttgttataattggacagtaacatcaaaaaatcatctacagggagtagttttttcttttttttttctgagatgaagtctcactctgttgccaggctggagtgcagtggtgcaatctcggttcactgcaacctccgcctcccgggttat

SEQ ID NO: 596 - DNA, 194 bp, Homo sapiens
gagcacctctgtgttcctaggtctgtgcagtgacttgggagtacagtgatgaatgggaccatatggtcccaccctcatgggcagtctctaattcctgccttatgaactgaagatctatttcttgtcctgactttatattcttcatggctaaaagatttggggcctctgaagagtgcatttgaactcaggcatgg

SEQ ID NO: 597 - DNA, 339 bp, Homo sapiens
gatgccttgagagtttcctgttgcacaatctgtttgtctgtagagaagtggcatccagagggcggtaggggaggaaaaaaaaatgaagtaatgggacagagcagacacaggtaaagagggccttaggtcctcaggaaaggggaaagggagggatatggcccttccctccaggtcctcatatttgttgccccttgttctggaacggacccagaggcttgccttcagagggttctaatttactctgtattctgtgtggtaaaagcaagaggcagcatgtccagtggactgtgagactgagcactctaaagccagtagggtcaagtcactggtagcccactg

SEQ ID NO: 598 - DNA, 333 bp, Homo sapiens
actgcaacctctgcctcacaggttcaagcgattctcctgcctcagcctcccaagtagctgggattacaggcgcccgccaccgtgcccggctaatctttagtagagacgggagtttcaccacgttgcccaggctggtcttgaactcctgacctcaggtgatcctccctccttggcctcccaagtttttaaaagatcatgctatgtggataatgagctggggatggagggaagaatggacctagggtggaaaccactggttagagtagagccacttcaagtgcatgggtttgggctataaaggtagtgctgtgagcaaaaattaaaaactcttgc

SEQ ID NO: 599 - DNA, 340 bp, Homo sapiens
gtgctgcatgtttaaagtattccctctgttttacttcatgatagttggcccctttcaggttataacacggacatttttctatggttttcattatttgcacatgccaacagagtagaatagatttttaacgagcatcacttcattgcaagcaaatttattaatccagtggtactgatgaaactaaggagctctttggggtcaggctcgatggctcacgcctgtaattcttgcactttgggaggctgaggcgggtggatcacaaggtcaggagttcaagaccagcctggccaagatggtgaaaccctgtctttactaaaaatacaaaaaaattagccgggcc

SEQ ID NO: 600 - DNA, 322 bp, Homo sapiens
  misc_feature (1)...(322): n = A,T,C or G
ctgtgttgcaggcataaacccaagtggcttttaaagatcagctgtgattaatagtagtcagttggaagtcagagtcatcagtttaaaatttagctcaacaaatggtggcttgcttggtagttcctgtgtttaacattatttttggaagaaaaagaaaaaaaaggaaggtagaggaagggagaatgttttgattgttttctaatttattgatctctcccttgcatcatcaccaagactgttaactggttcccagaatgttgtgggttgagcttctgtgctgtaatgtggtttgatttttttagaggggagataagggtatctn

SEQ ID NO: 601 - DNA, 318 bp, Homo sapiens
tttccctgctcacatgttacctttgacacactctggatctgaggaagtccctaattatctcttgcttttgcagactgcttacttgctgtgtggctctaagcaagttacttagcctttctgggccctggtttcctcgtttatgaaatgaagatgatatgagcacctaattcatagggctactgtgaggatatttaagttatttaacaatgactggcccatggtacttattccaggaaacaaatgagtataattataagtattttcaggacaattctctgtgatgtaatcactcctattttacagagaaggaaacatatt

SEQ ID NO: 602 - DNA, 326 bp, Homo sapiens
  misc_feature (1)...(326): n = A,T,C or G
ggttcaagtgattcttctgcttcagcctctccagtagctgggattacaggcgcgcaccaccatgccctgctaatttttgtatttttagtagagtcggggttttaccatgttggccaggctggtctcaaactcctgacctcaggtgatctgcccaaagtgctgagattacaggcatgaaccaccgggcctggtcaagaataaggtcatttattgttgtataggcaataagtgtgaatcaaggatacttttaaaaactcataggtgagcccgggcatggtggctgggatcagcctgcacaacccgtagtgagacaccatctctacaan

SEQ ID NO: 603 - DNA, 342 bp, Homo sapiens
aggatttaaaacatttcctgcagagagctcatagctgggtttatcttatagattaaaataaaaaggagctaccagaaggtctgtgtgtccaatacactttgttaccatctatcaagtctattttcttaagttgtcagagctgtttgcattcataataatagctttatcaagaatcagctccttttctagcatcaaaagttaagaatttaggccaggcgcagtggctcacgcccgtaatcctagcactttgggagactgaggcgggcagatcacttgaggtcaggagttcaagaccagcctggccaacatggtgaaaccatgtctactaaaaatacaaaaatg

SEQ ID NO: 604 - DNA, 317 bp, Homo sapiens
ttgtattaggtaatagaagttaggatttcagaacgtcatgggagacctgggggagactgcttgttttgaagttgaaagcagtacattcaaatatgtaagtgacagcatagaaaaatgtatatagggttaacgtgcagaggtctgtatttaggttttcctgtaagtttaaatcctgttgtttaaaacaaatattcggataagaataacactttaaaaccattcaagggctgggcatggtgactcatgcctgtaatcctagcactttgggaggccgaggcagaggaatcacttgagcccaggagtttgaaaccagcctg

SEQ ID NO: 605 - DNA, 316 bp, Homo sapiens
ccttatatatgctgtactgaagacatactatcacattaacgttgcgtttatgtctatgcgtgagaattgtatttctgtgcctaagaactttgggggaggaatcattattcctgctctgatattgacgctctctctttcaacagaaatggaccttttacaatattgaatggatctcagagaagataatgacggaggctctagatctctaggactgagagaacacgcttagcacatggggtaagatgggattgcatctctcaaacatgacacctcctgcctacactgactcaaccggccatcaggctttggaaaactg

SEQ ID NO: 606 - DNA, 340 bp, Homo sapiens
gaattgtcctagattatctaatccgctaggaccagaagaggaatttctgggttattgtggtaaagtttcatgtgatgaaccatccttgaattctctcagaataaacaccacatggtcataacatgttaattttattatttttttgtgagtgtgagacggagtttcactcttgttgcccaggctggagtgcaatggtgcaatctcagctcactacagcctccacctcctgggttcaagggattctcctgcctcagcctcctgagtagttgagactacaagtctgtgccaccacacttggctaatttttgtattattagcaaagacggggttttaccatatt

SEQ ID NO: 607 - DNA, 241 bp, Homo sapiens
ccttagaactatctattaaattctatcacaggagatcattggatcacaacagggcagtactttctgctgataagagtatagaaatattatagagatgtctagttaccaacacgataggaaagggggcattatcagcctttagtgatgaggaccaaggatgtaaaatacccttctgtgcaggacagtacctcagaaggaagaattctgctgtaacctccaggtatctgataagtgaaaagct

SEQ ID NO: 608 - DNA, 320 bp, Homo sapiens
aataaataaattatgtatcgtcggaggtttttactggggagagagctgtaggtaattgttgcaccacacagatgctccctccaggactgaaggacttacccctccagctgctgggattatagttggctgacactctccagcagctggcagtttccaggaactgcctgtggctgaagagaaccaccttactcaaagttctaccctcctcctaggggcagctgcatccaatgactggcctatgtggaggtataaatccatcttgccaatattcatacttatttacataatttacaatattcatacttaaagaatctgggccc

SEQ ID NO: 609 - DNA, 235 bp, Homo sapiens
accctttgatttttttctatcccacaacaatggagccagttttttttttttttttttaaatctgaaagggctctgggtttcacttaaaaggaaggcaactcaaactgacttaaacgatacttgacaaaaaaggggggttttgtttttctgcattgggcggatggctttctgcttttataactggaagatccagggatgggggggaaatcaagattgacttgccttaactgctcag

SEQ ID NO: 610 - DNA, 341 bp, Homo sapiens
aggacggctctgtctggaatctttgaggccgggaatacaggagccctaatgtgactttggactcggaattacctggaaatcagtgatttgtgccccacgttatgaagctatcaatttccaaagacagttaaaagacccctggctcaaaatggatagttaacatgaccaaaaaactaaaactgacttttgagtactgtattagacagtcattaactaaacctaagatattattttcttttgccagtagtgctttgttagcttgtgtgccataggggtgagctcagtggtattctgacaacctatgattcaacccttcctattaaaaaccacagttcttgtgt

SEQ ID NO: 611 - DNA, 334 bp, Homo sapiens
ataaatatgaacagtagaagctacagaaaaatgctgttgagtttttcaaaactatggcttttttttttaggtaagtaaagggaattagtaggggtttccctgttctatttactaatagaaatcgatacttgcgataacctcactaatcttcacatcttttatccaattttatccattcatactataaatgattattcattaccttccactctgcagggagatggcaaaaccaaacacacatatattctctctcttcctctctctctcttcctctctttctgacacacacacaaacacacacacacacatatcagatgttaaagaagttcacatg

SEQ ID NO: 612 - DNA, 332 bp, Homo sapiens
ataaatatgaacagtagaagctacagaaaaatgctgttgagtttttcaaaactatggcttttttttttaggtaagtaaagtgaattagtaggggtttccctgttctatttactaatagaaatcgatacttgcgataacctcactaatcttcacatcttttatccaattttatccattcatactataaatgattattcattaccttccactctgcagggagatggcaaaaccaaacacacatatattctctctcttcctctctctctcttcctctctttctgacacacacacaaacacacacacacacatatcagatgttaaagaagttcacg

SEQ ID NO: 613 - DNA, 331 bp, Homo sapiens
  misc_feature (1)...(331): n = A,T,C or G
ctcccagagtagcgtgagattacaggtgtgagtcactacacccagctaattttttttttttaaggggagatggggnctcactatgttccccaggctggccttgaactcctggcctcaggcagccctcctgcctcaacctcccaaagtcctggaattacaggcgtgagcccccatgcccggggcattcatatattatacacaacaacccgcaggctccattcatgcacgaacccccattgtcttcggccctttccagccctgcgctcgcatcattccctctatctcgggaacccgcgcccctcccccttttcaagatggtccacccctcgcc

SEQ ID NO: 614 - DNA, 326 bp, Homo sapiens
taatttctgtgcccctttactcaaagataggacaagacaaagaaaatgaaaacagacacaaactccaaggtccatgaaaccagaaactaatcctgaaccatgctaacaaaatagaaagcttatcaagtgattataaaccactctgcatataagcagcatataagtccaaatgcctgcagagagtactgtgggactcagaacagcacagggactagagcacgcttgttcaacctgaggcctgtgggccacatgtggcccacgacagctttcaatgtggtccaacacacattcataaactttcttaaaacattacaaggttgggcgca

SEQ ID NO: 615 - DNA, 304 bp, Homo sapiens
agggtagaacctatatgttgctattgtattgctatttatctacttaaataactcttactgtagtatgtattgctcaaggacagagattgcgctgctcatctttgtgatatcccacttagcatagtttctaagcaaatagtatacttctttcatatatgcttatcaagtaaatgaatttgactctacctcctattgaactattcagaaattcatgtttacgattttagcaatgagaacaccaagacttatctatagagtatcagagataatacaactagggagtagatctaaaataagacatctg

SEQ ID NO: 616 - DNA, 321 bp, Homo sapiens
  misc_feature (1)...(321): n = A,T,C or G
gaggtttcatttgtggtgacattctctcccaggccacaaaacatttcctgctcggaaccttgcttactaattgtaagaactttaccagtaagaacttgctttaaaaacttagcattcaaaaaaaaagctctctttaaaagttatttgattttcttggtttttttcttaccatgctatattttgagtttcacctaaaaaactaaggttatcttatctaattgctttaaatttatacatttagtcacattcaacaatttgttgctaatcattttgccagatgccaggcttttccaagaagtgtaggatcccatccttgaatcn

SEQ ID NO: 617 - DNA, 239 bp, Homo sapiens
cagatccacacttcggatgaaaatggctgaaaaggaggcagagatggcagaagactaaaggaaagcgccgagctgtgacttgacgcccattccaagggcagtgtggctcttgtgagaccaaaagaagagtaggaatgaacgcgggggtcctgtgagcagcgggtggctttgctgagcttggtgctcttagaagaccagccacttttgtccctgcagcccggggccacagagccagacac

SEQ ID NO: 618 - DNA, 317 bp, Homo sapiens
gatacttattttgctatccacacttgatgcaattgaattcaaggtgcaaagtcttgtactgaagcagtctccttgttgcttggagaacacctccttcagagccctttgttaaataagaggggcgacgttgatcatagatgccacctggttagcaccgaatctgactttggtgacagtcctaaagcacagctggtgattgtgagatctgttagcggcaggctgagcagatactacttggttttgcttggtatgagatactactgtttgcttagtatgagattttttccagcctgtctcttaaactcctgtgacatctt

SEQ ID NO: 619 - DNA, 318 bp, Homo sapiens
cggacctatccgtattgcggaccccaaagctcttcccggggcctttctttctctttgacaaagcatagctaaggtagctgggaaaggtgccaagagagagaagagagagaagcgatccagaagagagagctcccaccctcgctgctgactggcctgcgaccttcaggcctgcctcttacattctctcgcccttcccaaattattactaacacatgagtctgacatacagcgagctccacagaggaaagacctgtattctctggactatacagaatgatctacggacagagtgataggaggctgagtccacactctgga

SEQ ID NO: 620 - DNA, 317 bp, Homo sapiens
tcccacccgacccaagcacctgtactttgtcactctcccatttctggctagaccaggactccctttgacatctctaaccttgcagaggtgtgactctgccagagcactcttagatgtcgtacaggtgcatttgaagccttgtattttctcttaaaagataactggcgggtaatggagcgtgctgactctattgctaaagagaaagaataggctgggcgcggtggctcacgcctgggagccactttgggaggccgaggcagggggaatacctgagggcaggaagttgagaccagcctggcccacatgaccaaaccccc

SEQ ID NO: 621 - DNA, 315 bp, Homo sapiens
  misc_feature (1)...(315): n = A,T,C or G
gtagatcattttatttcctcttaatgtttatactgattactgttacattagctggatttttcaaaacaatgttgaagagtgatgacagacgtgactgtcttgttcttaattttcatggaagtaagaatgcaaaatattaatagggaatagtattccctattagtatgacatttacttttggttattagtaggtagtcattaacatgtttaagagtttccgctattcctgttttatagtgttattgctagaagtggttcctgaattttataaaatgccttttcagcatctattgatanaattgtatgatttttttn

SEQ ID NO: 622 - DNA, 342 bp, Homo sapiens
aaagtgttcagtcctagatgtttaactccttagctacttttgtaccagggatcaaactgattgaaagtaaatggtttatgtgggtcaaaaatgaggaaccaggctttgccattaagcttgattcttctaactctagctgagtcccacctggctttttcttggcttctgtaatcatgaactatttccaatagccagtggatataaggagttatagtagaaccaatggatggtttatagttgagaccctctgcattgtatgttacctatttcaagatttaagagtcattgctgggcacggtggctcacacctctaatcctagcactttgggaggccaaggtggg

SEQ ID NO: 623 - DNA, 339 bp, Homo sapiens
tatatatgataggaacgtgagcttgaggagtcgcaattgctggaatttgcttggggaatttgcctgccccaaatgaagctcctcttttcccttaacctagcttctcaagattctctcccttagttgaagatattactcgttacctaatcatccaagaaagacctcagagaattactcttgactccgtcctccttcttactccctattataaatcccacatagtttgccttgtgtaaatatttttcaaattacccaccccccattccctttcctgcttccacagctgtgatggaatccctcaactttcttttcaatatttcctgtagatttagacaaaaa

SEQ ID NO: 624 - DNA, 336 bp, Homo sapiens
  misc_feature (1)...(336): n = A,T,C or G
cgctgggagcccctcggcatcatgctctggccagcaaagcccctgcggcagcggcagcagctgtggctgccatcatcctggacaccatgttgccttgagaggcaattgttccttcccccattccatgggcactttcccagttatgacacaggatgatctggtcccagtgctgtaatggggagtggggatcacaggtggggcaatggaggagctctgaaagtggctttggatatctcactacccaaaaggaaaggcattagccaccatggccccaacaaaactaaaataaaaaggaaagggggtcaggcacggtggctcacgcctgtaatcccagan

SEQ ID NO: 625 - DNA, 333 bp, Homo sapiens
  misc_feature (1)...(333): n = A,T,C or G
ggtttctcaaactggcttgaggttaacaattacctgagccatgtattaaaaaatggagactccagagttactgaagcagcatctacagggtggggcccaggaatctatattcttagcagatgtgagccttaccatctggccctttggaaaatgatgcaagaagaaacttctctgggagaatttcaatctggaggcagcaggggaggggagtgatcttgcagagcctgtggcatcatctggtgcccatgacaagacaagagtggctctgggttcttcttaggcttcccccnatcccctcctcttagaactatagccattcgtcacatgaggtcg

SEQ ID NO: 626 - DNA, 336 bp, Homo sapiens
ttaatatacggaagtagctgtcttcctacaccttagtcaatagctaatcaaacttcttaatcatgttaatcgggtatttttaaaatgctttcagtatagtttcaatttgcttaactcttacattgactgcaactgaggatcatttcatacatttaggagccacttgtctttcctttgaactgtctctgaatgtgcccacttgtctactgagttgttggtcttttctatcagcaagcgatcttgctttttaaaggaaattagccctttgaacatgctgcatggcaactatttcttcccagcttatcactggagtcccaattttgtttatactagttt

SEQ ID NO: 627 - DNA, 337 bp, Homo sapiens
caagatgcttcagaactttctgtatccagtgacagcccagctgataagtatatcaaaaaggatattactgtaagctagtcatatttgaaaatagctgatatgttagctcttttttattgagagcagatatacaaagtatttcatgatgctataggatattaacaattatttctctcaaaactcttctgagggaagactcggctattattgaatgagttctgttgaattctctctgttccctcaattcttctacctccactgcataaatatatattgcatactggccaagtgcaatgactcacacctgtaatcccagtactgggaggccgagatgggg

SEQ ID NO: 628 - DNA, 333 bp, Homo sapiens
ggcctctactgggaaccaccttctgcaggacagtcaccaggccagatccagaaggcttgaggccctgtggtccccatccttgggagaagtcagctccagcaccatgaagggcatcctcgttgctggtatcactgcagtgcttgttgcagctgtagaatctctgagctgcgtgtagtgtaattcatgggaaaaatcccgtgtcaacagcattgcctctgaatgtccctcacatgccaacaccagctgtatcagctcctcagccagctcctctctagagacaccagtcagattataccagaatatgttctgctcagcggaaaactgcagtgagga

SEQ ID NO: 629 - DNA, 328 bp, Homo sapiens
gggagcccaaagacagtgacagggcatggtagaagggacttgctggactgttcacctttccaggccaccccttgaaaggaagcagatgtgggcaaaaaagagcaactccatttttcacacagtcagagccagcccaactgcagatggcctgtacatcgcagcaccaagcacatccctggtctaaagtgtcagttcttttttttttttttaataaaactttaagttctagggaacatgggcccaacgggcatgttggggacatatgaatacatggcccatgttgctgggctgcccccattaactgggcattctaagcaaactatcggag

SEQ ID NO: 630 - DNA, 331 bp, Homo sapiens
tgcttcctcggggctgggagaatgaccctaattctgaggtctctgggcggctgtgttctgcctggaaaaagcatctctggccacagaatcgatgttcatcttggagaccttctaggcttaagctgccttttgtctaaagacattcaatattggtatgatttcttgagctgtgtaacattcacatggctcaaaaatcgtgcaaatgtgccaggtaaagagtgcaaagcagccaggcacagtggctcacgcctgtaatcccaacattttgggaggccaaggagggtggatcacttgaagtcaagactttgagaacacgctggccaacatggtg

SEQ ID NO: 631 - DNA, 328 bp, Homo sapiens
gaagcctctactgggaaccaccttctgtaggacagtcaccaggccagatccagaaggcttgaggccctgtggtccccatccttgggagaagtcagctccagcaccatgaagggcatcctcgttgctggtatcactgcagtgctcgttgcaactgtaaaatctctcacctaggggctgagcaactcactgaaaaaatcctgtgtcaacagtattggctctgaatgttcctcacatgccaacaccagctgtattatctcctcatgcctggtccctcttataaacaccacataatttatacccagattctgttctgatcaccggtgaaccg

SEQ ID NO: 632 - DNA, 329 bp, Homo sapiens
ggtccaccccaagtctggcttctctcaggagggactcatgaacacgtgccctgagcacccccaaaatgacatcacacaagggcagaaaggagctgaagggggaacgtgaaaggcagaaagggagccgtggttgccaggcaaccagccctagcccacctttgtttgtttggtgacagcaactaaagtctggtcagggccgcttggccacgctcatgccttttcctctcaacagttgcttctttgagtcagggtgcagctctggtcacctggcggcctcttcagctcagccctccacaaagtgtgagcctgaaggaccaccctgaattgcc

SEQ ID NO: 633 - DNA, 196 bp, Homo sapiens
agatctattatatcttaatctctttccaaaagctattcaaatgaagagctccctattggtatcaataatagattattcattttagttttgaaaatatacatctgcttcttagaatacaaaataatgtactctgttttgtgttggctatatttaatatctcttagattaaaactgttcataaaaaagtaatggcacg

SEQ ID NO: 634 - DNA, 331 bp, Homo sapiens
gggagcccaaagacagtgacagggcatggtagaagggacttgctggactgttcacctttccaggccaccccttgaaaggaagcagatgtgggcaaaaaagagcaactccatttttcacacagtcagagccagcccaactgcagatggcctgtacatcgcagcaccaagcacatccctggtctaaagtgtcagttcttttttttttttttaataaaactttaagttctagggaacatgggcacaacgggcatgttggggacatatgtatacatgggccatgttgctgggctgcccccataaactgggcattctcagcaaactatcgcaggga

SEQ ID NO: 635 - DNA, 318 bp, Homo sapiens
tattcaaccatctaaaactctgccttcataataatgatggatttgctgtcatcataactcattcgtaggtaatcttgcaagagctgaactttggaactactgccatttggaagggttccattcactctaagggaaacctgagaatctgagttcatttactttttattcccccttttagcagtaatttgttcatttacctttaatgttgaaaggaagcaggttgaggccagccatgatggctcacacctgtaatcccaacactttgggaggccgagaccggcagatcacttgaggccaggagttcaagaccagcctggc

SEQ ID NO: 636 - DNA, 315 bp, Homo sapiens
ataacaggcccagactgcctgctgccagcacccaggcatgctatctgaggggcctagaaatcacttcaccctgcccaccacagcccatgcctgagcgcattatcaggggcctgaggacaagcccaccccacatgtactactcaaacccccacctgcacaagcatgttgtccagagggatggggattgtcacatcctgcataccaccactacatagacacacacacacacacacatgcactcacacattccaggggcctgaggatgggcctgcccagcatgttgccaccaccaccaccagcacccacctgcaccat

SEQ ID NO: 637 - DNA, 314 bp, Homo sapiens
gaaaactatggcaggaacacagtctcacagccaagagagatccccacccttgagaagacaccttcctgcctgcctgtacagccccctcgcagaggctgcaggtatcaagggctgatcccatgctcccagagcgctaccaaggaagggtcttcagaaaaaaatgctcatgaggcaagggggctgcaacccgtgccacagaaagccagatctttctttgcaccagttgtacagtttctgcaaaactgaagactgacattgaaaacgactgctggtcagctattccttgatcactcctagagagtgtatgttactaa

SEQ ID NO: 638 - DNA, 342 bp, Homo sapiens
  misc_feature (1)...(342): n = A,T,C or G
gacacaggttggagcagagaaagaggaaacatagaggtgccaaaggaacaaagacataatgatgtcatccaagccaacaagccatgctgaagtaaatgaaaccatacccaacccttacccaccaagcagctttatggctcctggatttcaacagcctctgggttcaatcaacttagaaaaccaagctcagggtgctcagcgtgctcagccctatggcatcacatctccgggaatctttgctagcagtcaaccgggtcaaggaaatatataaatgataaatccaagtgtgggaacagcagtaatgaactttaaagaagaagcanaggcactaggggtgatccn

SEQ ID NO: 639 - DNA, 339 bp, Homo sapiens
aaagaatgtactggcctcaatttctgataaggtatggatgaaccttcctcatgccagacaagaaagcaggatagattagcacactatggtaaaatgtatttcttcaaattaataaacctacatgagataattcacattagccaataaggcagaatacagtaaaattatataacaataattatttttctaagaagtgaggaaacagatgaataaaaagtgaatccctcccaggaaaggtaaacagcaactgtggcccaatgtctctgcatctctggaaataaggagctgaagaggctggaaaggtatattgacagaaagctgatataagagaagagatgg

SEQ ID NO: 640 - DNA, 304 bp, Homo sapiens
  misc_feature (1)...(304): n = A,T,C or G
tatactatctttaactggtttttcacgatggggcactaggaatctcgacattaatcttgcacagaggacttctacagagtctgagaagatatcatcatgctgaatctgatcatactgctttttaaaagtttaaggataagacatgtgtatatgtaacaaaacacattgcatctagaaatcaaaacttgaaagtatttccagggattaggattagaaggaatattagaggaaacttgaaatctgagtttaaaaagattttacctttttgattgctgcagaaatgtcctatgcactctttgcaagn

SEQ ID NO: 641 - DNA, 324 bp, Homo sapiens
aaagggctgggagtggggcaaagatgatagtgacaatgtccgattggccaggtaagccaggcctagtcttttcatctattttgtgctgggatttcttccacatgtggcatccatctcccagggatttttcctcagctcaggcaagacagtcacaagctaagatgagttttgggaagatggggaggtagaggagaggttgggcaccaggactctttcatggtgcagctgctttttctccctgtgaaagagatgggaatcctagcatctcaacttgttcttttcttacaataggaaaagtgttcatacactgattcatctctaaag

SEQ ID NO: 642 - DNA, 315 bp, Homo sapiens
cttccatgcaggaatcttctctttcagtgattctgttgtatttccagctttcctgagccattgaggcccaccatagggttttgcacatagtaagggctcagaaaatacgagttctcttcctctttcactttatcaccattaggccttccagccagacttcatatctttcctttccttcctatcttgggttacgccatctctctcactaagagttctttgctgaccctggggccaaattagcaagatgtgaccaacagcactgcaatagacatcagaagacccaaaccctaggccacctctaggctagccgtggaa

SEQ ID NO: 643 - DNA, 338 bp, Homo sapiens
gagggttttcaggcagaggaacagttggccaaggaagtcagcttctcagagctcaagaggttctgttttaactgtgaatggtaaaactgagaactatatcctggatactacacctggctcccaagcatctctgatatgtgctgttcaaaaccacaccagagaggaagaactgctctggtaccgagaggaggggagagtggatttgaaatctggaaacaaaatcaattccagctctgtctgtgtctcttccatcagtgaaaatgacaacggaatcagctttacctgcaggctggggagggatcagtccgtgtccgtttcggaggtgctgaatgttactt

SEQ ID NO: 644 - DNA, 337 bp, Homo sapiens
tatctcatagagtactgggattctgaaagtgaaaggtttatacccagtaaaagtatgggagtgctggaccaagctaacatgtacaagaagaaatatggtatatatttatggaaatagataatgaaaatgctgaattgaagagcaaagtttggacaatggagaatttttcagtttatcaatattggtgcactcttccatgaaggagtatttaactctgtgataagtaccctggaagaatgaagttatattacgactatgttggagcttgggcactagaagcatgctgaaagtgttttccactttaagtgaagtagaaatgctaagaggtggccgggcg

SEQ ID NO: 645 - DNA, 335 bp, Homo sapiens
gagtacaccgtagccaatgtcatctctgtcggctcggggctgctgagcgtttccgtgggacttgtggccctcctggcgtccaggaaccttcttcgccctccactgcactgggtcctgctggcactagctctggtgaacctgctcttgtccgttgcctgctccctgggcctccttcttgctgtgtcactcactgtggccaacggtggccgccgccttattgctgactgccacccaggactgctggatcctctggtaccactggatgaggggccgggacatactgactgcccctttgaccccacaagaatctatgatacagccttggctctctggag

SEQ ID NO: 646 - DNA, 337 bp, Homo sapiens
  misc_feature (1)...(337): n = A,T,C or G
gacacgcgttcctcaccatggctttgatagaggacactgcatctgagataatgttgccagtgattggatccagttcctgactgggcttctgactggtttttggctggttgtttcgatttgatgggcttcatgtaaacttttgacacacttctatgaccctgatcaagccatttcaccttcattctctgcatttttaccattagggagacaaggtatagaatatttactttgttctacaggagcgctagggaaattatacaaccccattcttctccagtcactaaggaatataagttcatctgtcaaaggaaaaatatcaacctaaatattgctattn

SEQ ID NO: 647 - DNA, 326 bp, Homo sapiens
ggcaagctggggggactttgttagccatgaaacctccaggggtgggtgttgagcttgggtttgtttcgctgtcctcccttctgctctcaggggagggtgtgggcctgtcaaggctgttgtcatgtggcagagagaaggccccttaggcgcgttaggggccagaagttggcgctggtgtttgtgcacggctgtgagtaagcgcgtaataaataaatcagaacgagatggacggagaccatgcgctgtgctttcatcctgctcagcccccagctgaggaggtttctgacccccatacccgtcctgcagccttcgagcaaatgtggggg

SEQ ID NO: 648 - DNA, 321 bp, Homo sapiens
tcctgtcagattagattctcgtaggagcacaaaccctattgtgaattgtgcatgcaaggcatctaggttgcatattccttatgagaatccagcaaatgcctgatgatccgaggtagaatggtttcatccccaaaccactccacccccagcctgtgaaaaaactgtgttccattaaaaccagtccagtccttggttccaaaatgattgggggctgcttctctagcccacagggagtaataatccttcagtaaggtatagtccagtgcaccaacaaggtgagcttctgggacaaaggaaaccaagatatgcactttgcagagg

SEQ ID NO: 649 - DNA, 324 bp, Homo sapiens
cttgtgcacacagccaagatttcttcaatgggtgtgagctagttgagggttaaccttgtaggttgcagagtgtatttgtttgtttgtttgtttttctctgtgatgcggctagtgctctgattttgtaggaggtttttcactgaagctcatagttataaacaaggacatcactgctaacattggtaatttttcctgtgttcagctattatcgtatcaagagcattttatttcagccagtttatgtcactaccttatccatagtttctgtcttatatttttatggaaatgtctttttctcttattgggggcactacactttctttg

SEQ ID NO: 650 - DNA, 324 bp, Homo sapiens
tagtattcttgtcttagttagcaatggaaaaagaaaagaagcaacttgggaggaagaaaggaaggaaggaaggaaggaaggacagggcaggccagggagtccaaaatatccagatgatggtgtaagcaggtacttaagttaggagaggtgaaggaacaattgaatatagctcaaggtagtgacactaaaagagagaattctaataaacatttccaaatagaaaatatagttaaacattgcgaaaactctgcacactctgaaaaaaaagaagattcttatagaatctctacctaagagaaacacacacacacacacacacgcaca

SEQ ID NO: 651 - DNA, 334 bp, Homo sapiens
ggccgaggcgggtggatccttgaggtcaggagttccagaccagcctgtactctaccctgggccacagagcaagactatctcaaaaaaaaaaaaaaagggggccccgaaacctttttttttttaaaaaggaactttttttttgcccccaggttgaaaaaaagggggcagacccccccccaagagaatttcccccggggaaaaaaggggattcttttttctcccccccgggggagtgggaaattaggggccctgcccccaccccgaaaaaatttttttaatttttaaacaccggaggggtgttccaaatgggggccggggggtgttgaaccccctg

SEQ ID NO: 652 - DNA, 338 bp, Homo sapiens
agcgcctggggtacaggctgggcccggcctctgtgggcactgacaagaggcccctctggggcaggcaaagggcatggttgtgggtggggctcccctgtgaggacattgagcacagctgtggcatgcgcattcagcaggaaatggtcaggggcatgagctgatctgtctattgcttctgagctcacagtgccctgaggagtacggtgctcaaacctcatgagcaaggtgaggcctgtcaagagagccatgtgtgctcagcagacccaggctgcagggcgagaacagggcttcctcagcctgtgatagggaccagtcaggtgcaggcaagaatctgggcc

SEQ ID NO: 653 - DNA, 333 bp, Homo sapiens
gctgcctgctgcagcctggtttcttgcttggactctagtatatatttgctaaatctcccaagcctcagtctcactatttgcaaaagtgagttttaatgctctttgccctgcttgcctcacaggatcttaacatagacgtaagatcaaatgcaatagcatgtcaaacaatgtgtaactccagttatacaaacattactgtatctcattggggatacgaagctctacacacttgaagatggtgaaggaataaaaatctatgtctcacagtccagacttggagtacaagtaataagaagaataaaacttaatcccttaagtagattcaccataagt

SEQ ID NO: 654 - DNA, 212 bp, Homo sapiens
gctgcctgctgcagcctggtttcttgcttggactctagtatatatttgctaaatctcccaagcctcagtctcactatttgcaaaagtgagttttaatgctctttgccctgcttgcctcacaggatcttaacatagacgtaagatcaaatgcaatagcatgtcaaacaatgtgtaactccagttatacaaacattactgtatctcattgggga

SEQ ID NO: 655 - DNA, 332 bp, Homo sapiens
gcatcatcacgcagatggtgtgctgtaggtaaactagccagtctcctgtgcccccagcctccctttttgggctgttttccccatttccatggaaccctttcctctgcggtcggggcctaggagccatctgtctacaaacctagtgttgaagaagaactgcatgatgccctggttcatcagcctagagaggtgggcagcaccctgcaattcccgtcctagattcatcactgcttttgtaagctgcttttgcctgtgcttctcagccttggtgaagtcatctgcattcacagtggcttgccttcgccccccacccctggaaaaagtccttgtgg

SEQ ID NO: 656 - DNA, 362 bp, Homo sapiens
  misc_feature (1)...(362): n = A,T,C or G
tatcggctgctagaagacgaanaagggagcagggcttgtggggaggggacctgggagtcaagatgaaagctcccacgcgccgggtgatagtttactggattgtaacccacagaataaaaagccacgagcccacagtgacgcacacgaacaattcgctgagtgaagagtcggtgtacacggagctgccctttctccttcctggccctggtgggagaatttttatcacaagtgggtgatgggttttgtccagtgcttttccatgtccgccgggatggaataaacgtgacgtttgtctgggggcctgtcagtgtacagcacgtcacggatcatctgcatgtgtgcccaggaccggggcagtcacg

SEQ ID NO: 657 - DNA, 350 bp, Homo sapiens
acgacagagggggcctcctgagtacctgggattacaggcacccgccaccacgcctggctgacttttgtctttttagtagagacggggtttcactatattggccaggctagtcttgaactcctgacctcaagtgatccacttgccttggcctcccaaagtgctaggattacaggcatgagccaccacacctagccaggattcccaatctttatttgccttgaggctgatggaaaattgctggagttctacctgggattcttaatataaactaacatatatacatatacaaatatatatgtgtgtacatataactgtaaaaaatagtgcgggccaagcacagtggctcatgt

SEQ ID NO: 658 - DNA, 323 bp, Homo sapiens
ggtgcacgtgcacccatggtgccattgccaccggcatgaatgcacccactcccctgccactgtgccaccttgccaccattgccagcgcatagactcacaccagtggccctgcccccatcccatgccacaaccaccactggtctggatgtgggcacaaaggttggcagccccacaccggccagcacccattcccccacactgaaactgccatgggtgcaaatgggcacatggaccccagttgccacgtccccccactgctagctgccactgctgctgttgccaatgactgcaaggaagctggtaatcccagacttatcagtatc

SEQ ID NO: 659 - DNA, 311 bp, Homo sapiens
tgctctgtcagcctgattctactcctcggggaggccctcccttttcttccaagttctatcacggtcctcttgttccccctgactgtcttctgtgcctcctcctctgggctgtagtcacctggataaaaacccatctccctcactaggctgttagctcctggaaggtagggacaagagtgggttggatcatctctgtgtccccagggcctcaggtagggccagcacacaggagggctttacactgaggatgaaaccctcaagaggaggccgggtgcgggggctcacgcctgtaatcccagcactctgggagg

SEQ ID NO: 660 - DNA, 340 bp, Homo sapiens
ataagtgagaagaagagacccagagaagtcgccatcagccccagggtcacacagcagtggcagaattcctactagccctgcccctctccttctcccaagcgaatgtccctaaacacagccccagccagcctgagctgccccgtcatttcccgactacaagcggactgggggcgtggcttccccttaaaagaagaggaaggaggctcaggcgggaagtgacttggccctgcagccggcctgggaggctggggagggacggggtttcctgtcacccggtctggctctttccattgagtcacctgcctcgtcttgggcgtggccaggggaggaacagggtgat

SEQ ID NO: 661 - DNA, 315 bp, Homo sapiens
  misc_feature (1)...(315): n = A,T,C or G
ggcacccaccaccacacctgactaatttttgtatttttagnagagacngnnnttnaccattttggccangctgggctggaactcctgacctcacgggagccacctgcctcaatctcccaaggcgctgacactccccgcgccacccactgcgccccgcggaccacccctcctcactgggagcgcgcccacccggggggccgccaccacctttcgccccccacccccacggaatggggagtaaagcgggcccccccgcccccccaccccgcgaattatcctggagctcacagagcgcacccgcccgccccccccccc

SEQ ID NO: 662 - DNA, 208 bp, Homo sapiens
ggcgtgtgagcttggttgtcctaccaaagccagcgtttcggctcgcgtgcgccggcctagtttgctcgcgtcctcacgcgctttgggtttcccggtctcatggccggcctgaccttatttgtgggccgcctcccgccctcgtcccgcagtgagcagctggaggaactgttcagtcaggtggggccggtgaagcagtgcttcgtggtga

SEQ ID NO: 663 - DNA, 319 bp, Homo sapiens
accaaaaggatttatatgtactgttgacaccataaaagattctgacgaagagctggacaacaatcagatagaagtactggaccagccaatcaataccacagacctgcctttccacattgactggaatgatgatcttcctctcaacattgaggtccccaaaatcagcctccacagcctcattctcgacttttcagcagtgtcctttcttgatgtttcttcagtgaggggccttaaatcgattttgcaagaatttatcaggatcaaggtagatgtgtatatcgttggaactgatgatgacttcattgagaagcttaaccgg

SEQ ID NO: 664 - DNA, 305 bp, Homo sapiens
caactcgaggagaaaaccaaatctattgaactccattgatgatttggaatgttgatagtcacaagcaaatgtaagaataagaaagactgctttctcatgaaactttttaataaaacttctggaagcattttcataaccaaatacctggagtacactgcctcactatccttagtcatgctagctttctcttccctgcagtatagatctgccaattcaaatctgtatggcaccagggctggcatacgcagaatgattcaattagtaatatggcattgttaaaatattataaagcgggccaggcacgg

SEQ ID NO: 665 - DNA, 309 bp, Homo sapiens
catgactgactcctcttttggcatgtcttagttaagagtcatctctttagagagagtgtccttgacaaacaaatctaaagtaaacgctccctgctattttcttccataacatcctggcaatagtggcaggcagggagatgttcatattactgagcacgggtttgacttgatattagaatatatatttatttgctcagctttttttttctcatccctaataaagtttaaattaaattgaagattgttgagtttgaaaatacaggaaggagagactgtcatggattacccattgatagaggaatgtccctg

SEQ ID NO: 666 - DNA, 310 bp, Homo sapiens
attcatcagggaccaaaacgttcatgttcattcagcattcgtgggtctgctctacccaagaagttttctcactcttcattggttctaccaagcataagcaaatcaaacaactcattgagagaatgtcatcagccaataaaataagaaactgctcccaggccctgaatcagcttattaaaattgacctctgggactagcttctcctaatacataaaattataaaaaagacttagacacagaacctcaagtctgttctaccaggaaattttacacaagtattccagaaatcaaccaatcattctaacccatt

SEQ ID NO: 667 - DNA, 311 bp, Homo sapiens
  misc_feature (1)...(311): n = A,T,C or G
tctctctttctctcccctccttccgctgtggttaaacacagaagacagttgcagagttgtaggtcaaagggttattttaagcatatgaaaggacagcccaaacagaggataggctttatggccaaagtttgtgctcaataaagagtccctttgagccgggcgccgtggcttacgcctgtaatcccagcactttgggaggccgaggcgggtggatcacgaggtcaggagatcgagatcatcctggctaacacggtgaaaccccttctctactaaaaatataaaaaattanccgggcgtggtggtgggtgcct

SEQ ID NO: 668 - DNA, 308 bp, Homo sapiens
ttagatttccctaattatgaatgatttgaggagcttttcatgtgcttattggccatttgggatcatttttagagaaatttctacttaactcttttcttgttaaaaaaaatttgattgttattgcttactagcggtttaacctcgtactaggtgctcagtctctctgggactgaatcttctcatcttaacagcagggacactcacctcacgaggttgctggggtgcataagatgaggtggtacgcattgatgctcaacccagtgcctgattcacgggagaaacctaaaacatttgttattattgtacca

SEQ ID NO: 669 - DNA, 304 bp, Homo sapiens
tgatccgcccgcctcggcctcccaaagtgctgggattacaggcgtgagccaccgcgcccggcctgtaccaacttcttaatgcctcaactgcatctctgcttggacttttactgcaaacaaatatattatgtgatgtttaaaataaaagaaatatgatgttcagtaataactggtggaatgagagaatttggctccatcttctctaataacaaaggagttctgctcctacatctgagcaaaattataacctttttacataaaacaactgcgaagagtcccagcatgaacaccgcagtctctgggg

SEQ ID NO: 670 - DNA, 150 bp, Homo sapiens
taactgggcatatttaaagagaatttaagacatagccagatgatctcacatcattttaacgtgcaagatattcgagtgtgtgcacagtgtatggaaaggtctgctgactccttattcaaaggcttgcattccagcccggtccaccactta

SEQ ID NO: 671 - DNA, 313 bp, Homo sapiens
cgtgcctataatcctagctacttgggaggctgaagtgtgaggaccacttgaactcaggagttccagcctgcagtgagctataattacactactgcactccagtctaggcaacagaaggagaccctgtgtctttaaaaaaagacaaagaaaaaaagaaagagagtgagaaagagccaggagacataggttttagtggctctgtgaggcataaagtcctgggtgaccccatggatatttcaaagaggtcttcacatttccttgtatcacaaaatttgatgggtgactaataaaacatgtacagatgtgccttaag

SEQ ID NO: 672 - DNA, 307 bp, Homo sapiens
  misc_feature (1)...(307): n = A,T,C or G
ggagaacccttgggggttacatttcaatatggggcaattattggtggctacaagtaggttcgtgcaattattggtggtaggatttgagctggcctgaaccacaatattcagacactaccccttctgtctgcccctctcactatcccaagggagaagggattccaaaatctcaacacttcactttcctgtattaagctgtgaatgcaaacaattgttctagtcattcaatgtcttctgaggaaaaacaattcagtgcagaatctaacatacaccatgtctatcatgtaaaatttatgccacagaaaan

SEQ ID NO: 673 - DNA, 306 bp, Homo sapiens
  misc_feature (1)...(306): n = A,T,C or G
caggctgtgtgggaaactggctgtggtgggccggtctgaggtctcaagtctgacaggggccactggagcctccaactcaccaatcaaccaagtgtgagaggttgctttggttgaatggccatgtgctggggtctgactggcccagccacagggaggctggcatcccctagctgagtcctgtacccagaccctccagggcatggagcccattgtgaggggtctggtgctgaagtggtgggggaggcccgtgcaggcctacagctttgtcatctgcaacattcctctccccactttctttaaactttn

SEQ ID NO: 674 - DNA, 313 bp, Homo sapiens
  misc_feature (1)...(313): n = A,T,C or G
tcctttccttttagtctttatctcattgttatatgtgattataatgttgtcatttatgcagttgtatgttctattttaaaccttaaaatttgttacttaccaactttttgaatatgcctgactgaaatgattcatactgtagcatgtgtgactcagggtagtgaaagggggtttgttttgaatancaagatgagcatcatactagtcttccaccacaaaacattccatgcaacttgagacacagatgaaacagccaattttcttcttggcttgggggtggataaagggtggattgactcatagagggcttacg

SEQ ID NO: 675 - DNA, 310 bp, Homo sapiens
tactgacatagtgacttagtgatttagtagtgattatgtgacttagtgacatagtgacttagtgattatgtgggtttttccaaacaacaaacatgtgttgcatactttctgtgatagccaatgagaatttaaagatacatagagcataactgttgcccccaagcaacaatgtaataaagaaacaaatatatatgaagagaactgcaaaagactgcaaatatgtactttcatagaagcgtgtgcaaaaggtttggtgatgatactttaaaagggaccagagaagtcatagccagggttgatttccataagc

SEQ ID NO: 676 - DNA, 313 bp, Homo sapiens
agagtaagaccagtaagacattctcaaagagttaatggctttttgattcagagttgctttcttgggccttttctcctttgtcagcttctttagaaatcccatgctgctccaagttgttgggatgtttgaatatctggaagtgataagagatgacagaaagtcaaggtatatgactagagcagcagccaccaagggtgagttcctagtctccttaagaagtgactggtcactcaaggtggtagaattaagagcatcactttggggagaagtagctacagatgcagctagggcagatcaagttgttaatgggccg

SEQ ID NO: 677 - DNA, 312 bp, Homo sapiens
actgtactccagcctggtgacagagcaagactccgtctaaaacaacaacaactctaccctccttttccattataggcttctggcctgaaacaggtttgctatatagcaaaacatcaaaaacaaagccaaaagacaaatgacaaactggggcaaataggcaaacggttaatatgttaataggtcttatatataaataacattaaattgggtttggagtttttattaatatcatggacaaccattctgatttttgcattgagacagtaaccgtaacttaaaatgaccgtaggattgtctactaactaagagtga

SEQ ID NO: 678 - DNA, 299 bp, Homo sapiens
ggccccccgtgcagccacctgctgcacttgcgcactgggagcgacacgctcgggcataagtagtgccggaaagttagctgccgagacctggtggattgcttttcgtttatcagtgcaggaaaacagcgctatagtactgcgtcacaactagcgcagactccggcagtatttatgcggtgcggcttgggaactagaatccacttcctgtcttccgcctcaggctagagggcgagcgcttcgccgtgggacttcttctgcctggctccgcctcttgccccggaagtactcacagcggacgg

SEQ ID NO: 679 - DNA, 311 bp, Homo sapiens
ggcctctactgggaaccaccttctgtaggacagtcaccaggccagatccagaaggcttgaggccctgtggtccccatccttgggagaagtcagctccagcaccatgaagggcatcctcgttgctggtatcactgcagtgcttgttgcagctgtagaatctctgagctgcgtgcagtgtaattcatgggaaaaatcctgtgtcaacagcattgcctctgaatgtccctcacatgccaacaccagctgtatcagctcctcagccagctcctctctagagacaccagtcagattataccagaatatgttctgct

SEQ ID NO: 680 - DNA, 312 bp, Homo sapiens
ttccagagtaccactgagggcccgacttggatctggtactccttctccatttgtgtctcttatattagtggttccctaactttgtagcacgttagcgtcacctgggggccttttaaaaaccctgatgcccaggtcgtgcccttatttaattaagtaagaatgtctggggaggtggtccctggggctccagtagcagagtttgggagctgccttcctaccacttggcctttcattccctgtgttcccttctgtctacattggccccctactggtcccacctcagggtcttgtcctcattccccctctgcctgg

SEQ ID NO: 681 - DNA, 304 bp, Homo sapiens
gatgtcttattttaagatattttaaaatgttttacatttgcttaaaattttacaattgagaaaacatttctgcataaacatcatatctcatttccttataataataattctgtaagcttatacactgaaaaaaatggtagaaaagtaagaaaaactgctcaaggacccacagaccattttagaattataatattaattctggtcttctaaattcagtgcacattgcattacatgacagtcctctccatctttagcaacagagataaaaatgttggcatcggggccgggcgcggtggctcacgcc

SEQ ID NO: 682 - DNA, 302 bp, Homo sapiens
aagagttagaaagaaaagaggaaggcgggagaaagcgtgcggaagcttctgggagtgtaaactttcttgcccttggccgctgcgccctctaaagccccggtgcgctccccctaccccaggttttcggagcctcccagcctctcctcgtaaggcggttccggccgcctcatccccgtcctctgccccaccgcacccaaggtgttggtttcgggaaggacctacgctgggtcccccgaggctcctcggttcctgccgatgctctggccggacccgagggggcggcctgtggacccgcgttactt

SEQ ID NO: 683 - DNA, 205 bp, Homo sapiens
  misc_feature (1)...(205): n = A,T,C or G
ggcgtgtgagcttggttgtcctaccaaagccagcgtttcggctcgcgtgcgccggcctagtttgctcgcgtcctcacgcgctttgggtttcccggtctcatggccggcctgaccttatttgtgggccgcctcccgccctcgtcccgcagtgagcagctggaggaactgttcagtcaggtggggccggtgaatcagtgcttcgtgn

SEQ ID NO: 684 - DNA, 312 bp, Homo sapiens
tacatcattcaaaactttgtgcagattctgaactctgaggagtttcttgacctgcccgtggacactctgcaccacatcttgaagagtgatgacctttacgtgaccgaggaggctcatgtgtttgagaccgtgatgagctgggtccggcacaagccatcagaacgactctgcttactcccctatgtcctcgagaacgtgcgcttaccgcttctggacccgtggtactttgtggagacggtggaagcagatcctctcatcaggcagtgcccagaggtcttcccgctgctccaggaagccaggatgtaccacctt

SEQ ID NO: 685 - DNA, 162 bp, Homo sapiens
ggtccccaggaagatgtccgtcagccccctggagagctggctcacggcccgctgcttcctgcccagactggataggggaccgcagggactgtggctccaccgcaatcctaccagtgtccgcccagccagataggggaaggggccgagcagggggatgaaggc

SEQ ID NO: 686 - DNA, 292 bp, Homo sapiens
ctgcatgatttattgtgctatctggaaaatcaattttttcttcttgggaccacagaagagtctgtttcaaaacacatttgcacccttaaagctaacatattcagtcttactgcctctggtatctgtaagcagacccattccatgctatttttaggatcatttccagaaaaataatttgtttcattgtggagtctgtcaagctaaatggagttattttctttgtggagttggatgagtaaatctagtcctaagaaaatgaggatttaaaacatttcctgcagagagctcatag

SEQ ID NO: 687 - DNA, 293 bp, Homo sapiens
ggccccccgtgcagccacctgctgcacttgcgcactgggagcgacacgctcgggcataagtagtgccggaaagttagctgccgagacctggtggattgcttttcgtttatcagtgcaggaaaacagcgctatagtactgcgtcacaactagcgcagactccggcagtatttaggcggtgcggcttgggaactagaatccacttcctgtcttccgcctcaggctagagggcgagcgcttcgccgtgggacttcttctgcctggctccgcctcttgccccggaagtactcacagc

SEQ ID NO: 688 - DNA, 288 bp, Homo sapiens
tgttgtgccaaggggttaaagaaggtcccatctggccctgagtcccagtcctcaggtgtccctgaggtgtctatcatctgtgtggtccacattcttcagttcacatatgtccccactgagaaggctgcatcagccatcgtgaccaactctgagtcaggcttgaggacccaggaatcagtcatttgactgcttctgtgtcctgtgggggtgctgtttgtggcaatgactctctggacccatcacacagatgtcccctctctgggttcttgttgtcccctctggactctc

SEQ ID NO: 689 - DNA, 286 bp, Homo sapiens
ctgaataatattattacagaactgaaaaaaaaaacccaaaaatactactgtaagtatataaaaacataattgaatgtgaaattgttctgttttatgtaaattatgtttaaagctaataaaggggaaatgtataaaattataaagaatttaaaaaataaggccgggcacagtggctcacgcctgtaatcccagcactttgggaggccgaggcgggcggatcactaggtcaggagatcaagaccatcctggctaacatggtgaaaccccatctctactaaaaaaaata

SEQ ID NO: 690 - DNA, 284 bp, Homo sapiens
gactgcatgcacagggtttacattttcttgtgaatctataatcatttcaaaatgcaggtttttaaaaaaagtcgttacactggaatgaaataaaatgaaataatgtgagaaaaatagacaagaggattaaaccgcttatgcttaataatactgagactatgtcgcagagaaacttctaaggaatatttttggtcaagagatttgtatcggtgcggttcaaagatacacgaaaatttgatgttgttgaaactttcctaaaaatgatacagaggtaacaatatacg

SEQ ID NO: 691 - DNA, 283 bp, Homo sapiens
aagaacaggcggttgctgctcatgtagatctataaatatgtgctgtatgtcttttttgctttttttttaaaaaaaaagaacaactctttttgcctctttaaattacatacaagcatcgtagtcttggtagaaccacaatttttgttgtttatttataaggcaattgagtggggcgaaaagagcattatttacctgctgaattcaacatcttggaagcaccagggaaaaaactaggatcctactattatttttgcggcagataatgactctagtttgacttctg

SEQ ID NO: 692 - DNA, 285 bp, Homo sapiens
gcctgctacgcagccttaaaacctgaggctttaagttcctagtattgagaagccccagatttcatacttatttactctgttggtttcactttcctctccattttgtgtctcttgggataggctttgttttattttcaagctcagctatgtatataaaagaatgctgggctgggcgcagtggctcacgcctgtaatcccagcactttgggaggccgagttgggcggatcatgaggtcaggagttcgagactagcctggtcaacatggtgaaaacctgtctctacta

SEQ ID NO: 693 - DNA, 280 bp, Homo sapiens
  misc_feature (1)...(280): n = A,T,C or G
tttgtgatctgtcatggtcatggtatttcagagttggaggatggtctgagttctgacctggtgtaggaatcccttctcccaaaactctaacagtacattctcaggcttcgtgagctcacgcttaagacacattattttctgatgctggacagcttctttaaaaaaatgtagattcttacattaagctaaaatttattttatgaaagttcaagaattctggtccaaattgggatgaggcctatggtgcaggacttccgtgaaattttatgagattacaaan

SEQ ID NO: 694 - DNA, 274 bp, Homo sapiens
tggaaggctggcacgggggtgagggatgaaatactatctattgagttcaaggtacactactcgggtgatggatagagctaacagcccaatcttgaccactatgctatacatgcatgtaacacaactacacttgtacccctaaatttatacaatatttttttaaaaaggagaagatagtgtttagtcagatgattggtctaaggttagaggggggtgggtatatttaaacagcacacttttgtacaatctcttagatatcctaactaaagaaaac

SEQ ID NO: 695 - DNA, 268 bp, Homo sapiens
ggctgaaataattttaagtagcttgccccaaattacatgggcaacaaaaggagctgaggtggcactaggtagagcgcaactcgtgtcattcctgcgccactttgtgaccatatcacaatgtctttcctgccctaccaaaataggtattaataacagccaatatttatatcattctcttacatgcaaaacactgctatgatgcgttatctcacctgacctccacagtgctgtaagataggcaccatgattttactccctttacacacgg

SEQ ID NO: 696 - DNA, 428 bp, Homo sapiens
ggcacgagcccccaccctaccacacattctatagaactgcaccaaccccaggaaccgcaatcagatctctaaggcgggcgccgggaaacaggcccccgagctgccagactatgccccagactaccagcacaagttcagttttgacatcatgcctacggcccggcccaagaggaagggcaagtgtgcccgcaggacccccatccgtgcccccagcggggtgcagcaggcctcctcggccagttccctgggggcctccctcctggtctggacactggggctggcggtcactctccgctgaggacccacggcgttagcacccagcactgccacatgtccaccaaggaacagaatttattttcttctttttttaacaagcggaagatctgctgggttccaggaaaaggctggtacaggcttctggggggtgt

SEQ ID NO: 697 - DNA, 428 bp, Homo sapiens
ggcacgaggcagcctggcctaacgtggctgcagtctccattactgggcggaagcggagccgggtagcccctgccgagccccaggaggcccctgattccactgctgcaggaggctcagcctcgaagcggatggcgctggtgctggaacgggtgtgcagcactctcctgggcctggaggaacacctgaatgccctggaccgggctgctggtgacggcgactgtggcaccacccacagccgtgcggccagagcaatccaggagtggctgaaggagggcccaccccctgccagccctgcccagctgctctccaagttgtctgttctgctcctggagaagatgggaggctcatctggggcgctctatggcctgttcctgactgcggctgcacagcccctgaaagccaagaccagcctcccagcctggtcagag

SEQ ID NO: 698 - DNA, 426 bp, Homo sapiens
ggcacgaggcagcctggcctaacgtggctgcagtctccattactgggcggaagcggagccgggtagcccctgccgagccccaggaggcccctgattccactgctgcaggaggctcagcctcgaagcggatggcgctggtgctggaacgggtgtgcagcactctcctgggcctggaggaacacctgaatgccctggaccgggctgctggtgacggcgactgtggcaccacccacagccgtgcggccagagcaatccaggagtggctgaaggagggcccaccccctgccagccctgcccagctgctctccaagttgtctgttctgctcctggagaagatgggaggctcatctggggcgctctatggcctgttcctgactgcggctgcacagcccctgaaggccaagaccagcctcccagcctgggctg

SEQ ID NO: 699 - DNA, 424 bp, Homo sapiens
tcgattcgccggaacccccctccccaagactatgaaagtgatgacgactcttatgaagtgttggatttaactgagtatgcaagaagacaccagtggtggaatcgagtgtttggccacagttcgggacctatggtagaaaaatactcagtagctacccagattgtaatgggtggcgttactggctggtgtgcaggatttctgttccagaaagttggaaaacttgcagcaactgcagtaggtggtggctttcttcttcttcagattgctagtcatagtggctatgtgcagattgactggaagagagttgaaaaagatgtatataaagcacaaagacagattaagaaacgagcgaacaaagcagcacctgaaatcaacaatttaattgaagaagcacagaatttatcaagcagaacattgtgatatc

SEQ ID NO: 700 - DNA, 414 bp, Homo sapiens
  misc_feature (1)...(414): n = A,T,C or G
ggcacgaggcagngaaaacatctccactctgaagaagacactggagagtgactgcaccaagctcttcagccagggcattggaggggagcaggcccaggccaagtttgacagctgcctttctgacttggccgccgtgtccaacaaattccgagacctcttgcaggaagggctgacggagctcaacagcacagccatcaagccacaggtgcagccttggatcaacagctttttctccgtctcccacaacatcgaggaggaagaattcaatgactatgaggccaacgacccttgggtacaacagttcatccttaacctggagcagcaaatggcagagttcaaggccagcctgtccccggtcatctacgacagcctaaccgggctcatgactaaccttggtgccggcgaggtggaaag

SEQ ID NO: 701 - DNA, 404 bp, Homo sapiens
ggcacgaggaacgtcctatgtgggactttggggcaaacaccagtttggctgccccaggagaagaggccgccctggcccagctccatccatctggagagcaacacagacccaggacccccggcccgcatctggtcgacagatgtgtgtctctatctggcaggcagccccggggacccagcagaaattttgcccctagcctagctctggaatcgacctccaggtatcttgtgaacctgaggcctcctcctctcacacccaagaaggcccccaggcctgtggtgctgtggtcctggcccctgcagctgggactccaggaagcgtgccgaggcccaccatgctggctggcagctcccaagggcaggtctgtctgagccctcatactgggagtgagcctgggtagacaa

SEQ ID NO: 702 - DNA, 317 bp, Homo sapiens
  misc_feature (1)...(317): n = A,T,C or G
ctaacggtggagcttcaggtctgcatttttctttctctttttttagtgggcacagctatgatatcaaaaggtaggcctggaaccaagctgatgggagagggaagacctgaactggtcagtataagaaggaaatgagaaatgaacaggaatgaaatggggcgcgagtggtcagagagcaaanaaggaagtgtgggcagtgagtgcctgatggctgcggagtttctgtttcaaacgataaaaaaaaattttagaaatggacacaacattggccgggcacggtggctcacacctgtaatcccagcactttgggaggctgg

SEQ ID NO: 703 - DNA, 398 bp, Homo sapiens
cgttgctgtcggtttttcatttttttctatcatgttcttaattttcattccttttctatagcattctattcttgactcaagaatgtaacattttgtctgcatatattcatttttttgaagttttcttattcctgcatagtctattgcttcatgtattttttttgtttttgctttcttttggactctgtcatgttggaaacttttctcaattgccttccttaggtaactgcataatgtgatgtggaagattcaaaagttgattgccttatctaaattcgacagtttgaaacttccctttaggctgatctgggtcagccattttgggagagttctccagagaccttaagtcttatgtcttgtgctgggcagacaccctcagggaatagtcttccattttt

SEQ ID NO: 704 - DNA, 395 bp, Homo sapiens
cgttgctgtcggcgaccagaaatctctatcacagatttattgatgaagaaacgaaggataccaaaggtcgttattttatagtggaagctgacataaaggagttcacaactttgaaagctgacaagaagtttcacgtgttactgaatattttacgacactgccggaggctatcagaggtccgagggggaggacttactcgttatgttataacctgagtcccttgtgaacttttgaacataccaacagggtatagagtatagaggctatttctataattttcttatatataatttttttaacttttaatcttttttgcttccttttttttttttttaaaaaaagattttttttttaacaccgggggttttttttttccccccagcttatttctagga

SEQ ID NO: 705 - DNA, 395 bp, Homo sapiens
  misc_feature (1)...(395): n = A,T,C or G
cgttgctgtcgcaccaggccaggagggggctggcggctagggactgcttgtctgtgagcttctagacctgggtgctctacgggtgatgggaggaccagcggggaggggcaggctccctgtccagagtcttggaggtggggccctgggtggtggctctggctgtcccggccttgagtagctgggatctcatgagtccgggagtccctctgtgtccacatcctgcagtgctgcgggggctgcccggccagatgcaggccagggctggacacttactcctcctagacttagcttgaacagtggcattaaccatggtcactcccataaacccaggctccagaccaggggcccgagagcgaggcctggggactgggaagtcccanaaccccgaggtggag

SEQ ID NO: 706 - DNA, 396 bp, Homo sapiens
cgttgctgtcggttcaggaccagcttggacaacatggggaaaccccgtctctactaaaaatacaaaaaacagccgggtgtggtggcaggcgcctgtaatcccagctacttgggagactgaggcaggagaattgcttgaacccaggaggcggaggttccagtgagccaagatcgtgccattgcactccagcctgggtgacacagtgagacattgtcaaaaaaaaaaaaaaaaaaactgctgggggcctttttttgctgaatcccaaacatggtgaacaccttggtggggtgggcccaaccccctttgaaatggcgggaaaaaatgggcttttttgggaaaattggggagcgtttgttttttttggaccctttttaaagctgaaaaaaccgttttaac

SEQ ID NO: 707 - DNA, 394 bp, Homo sapiens
ggcacgagcagctttagagtcccctagaaagagcatcatctttgagccttatccctctgtggtggaccccactgatcccaagactctggcctttaaccctaagaagaagaattatgagcggcttcagaaagctctggatagtgtgatgtctattcgggagatgacccagggctcatatttggaaatcaagaaacagatggacaagttggatcccctggcccatcctctcctgcagtggatcatctctagcaacaggtcacacattgtcaaactacctctcagcaggtgggtcccacattgagaactggcattcgatcctgcgcaatgggctggtcaatgcatcctacaccaaactgcaggaatgggaaaaggacagcacaggatgccctccaag

SEQ ID NO: 708 - DNA, 396 bp, Homo sapiens
cgttgctgtcggcagcggcgctggctttagaaaattacttttcccactgaaacacacccaagtatatgcccagccttcatgaaagtgaacagagaaacgaagcgcctttatgtgggtggccttagccaggacatttctgaggcagacctacaaaatcagttcagcagatttggagaagtttcggatgtggagatcatcacacggaaagatgaccaaggaaacccacagaaagtttttgcatatatcaacatcagtgtagcagaagcggacctgaaaaaatgtatgtctgttttaaataaaacaaaatggaaaggtggaacattacaaattcaactagcaaaagaaagctttctgcacagattggcccaagagagagaagcagcaaaagctaagaaa

SEQ ID NO: 709 - DNA, 385 bp, Homo sapiens
cgttgctgtcggcagcaaaaaaacagttatgtgagcagtttcacttggaggttcacatggggtggcagcacacttaacatctaacacaccaggttcattgtgttcataacacttgtcatttactgtaacaacattttttcataggagagtaaatagcccttcagcatgctcattcatgaaacagaagaggctgtacaagtgaagacaagggctttttatgcaagttttgaaagataggtatttattttttctagagacaggagttttgctctgttgcccaggctggagtgcagtggtgcaatcatagctcattgaagcctcgcactcctgggctcaagtggtcctcctgcctcagcttactgagtaaggatatgtatttcttaaa

SEQ ID NO: 710 - DNA, 386 bp, Homo sapiens
cgttgctgtcggtgaccagaaatctctatcacagatttattgatgaagaaacgaaggataccaaaggtcgttattttatagtggaagctgacataaaggagttcacaactttgaaagctgacaagaagtttcacgtgttactgaatattttacgacactgccggaggctatcagaggtccgagggggaggacttactcgttatgttataacctgagtcccttgtgaacttttgaacataccaacagggtatagagtatagaggctatttctataattttcttatatataatttttttaacttttaatcttttttgtttccttttttttttttttaaaaaaagattttgtttttgcccccaggggttttttttttccccccagctta

SEQ ID NO: 711 - DNA, 363 bp, Homo sapiens
  misc_feature (1)...(363): n = A,T,C or G
tcnagtgcgcgggaggctggtgtgtctgtatatgtggtcaactctctggatgttaacaccttgctggctggccaccaagtgaagataaactggcctgggtcacaagtcttttttctgtgtctagttgcccaaggtggacacatctctgtcatgtctcaggaccagtaaactcaagctatgcttggaaggacagaattgatcaagatggaatgactcctgagaggagacagtagtgatatttctgctccactgctatttatttttctggcttcaaggttcagattcaaccatggcaggagagaaagtccttagcagnttcttattttatattttttttgggcctatgcacccctcattaataag

SEQ ID NO: 712 - DNA, 361 bp, Homo sapiens
tgaacccggggggggggtttgcagtgagccaatattgtgccactgtactccagcctgagcaacagcgcgagagtcgttctcaaaaaaaaaaaaaaaaaaggggggggtttaaccccctggtatcccccaccttttgggggggggggggattctcattttttgccgggaaaaaatttccaggttgggattttcttaagtttggaaaggttgccccttgggctttaataacctttaaaggttaataaaaaggggggggttcccccgggaatcccccacattttgggggggccgggggggggggaccaaaggccagaattttaaacccccccggcccaacataggaaacccttgttttattaaa

SEQ ID NO: 713 - DNA, 390 bp, Homo sapiens
ggcacgaggttgggtagagacggtgttttcaccgtgttagccaggatggtcttgatctcctgacctcgtgatccgccctcccgcctcggcatctcaaagtgctgggattacaggcgtgagccacggcgcccggacttccttcttttttaagcaaagcctgttagaatggcttggatctcgaggtggcgtcttacccgacctccgagggctctgcagccgctgcgggagaatgaccctgtcggtatttttgaggctgctttgagcgcggccccctgccaagtacccggccatcaaggccctgatgcggccagacccgcgcctcaagtgggcggtgctggtgctggtgctggtgcagatgctggcctgctggctggtgcgcgggctggcctg

SEQ ID NO: 714 - DNA, 382 bp, Homo sapiens
cgttgctgtcggcctattacaagcacattctttgattgagtcattggatataaacttactaaatgcataaaaagcagtcaatttacgaaacttctgagttggtgggacactgttgattaataatgtactgtatgaattaagagatgctttaactttgattttacattttataggtaacatgtggacattatagtatcaaacatattggcattatgtcggcatactagaaacattgtatttcctgtgcttttaaagtatactctttacatgatctgagagaggattcaaggtgatagaaatagctgaggggaaaagggggaacattttggtatgaagattggccttatggtgatgggttaattacacattatgatgttagaag

SEQ ID NO: 715 - DNA, 351 bp, Homo sapiens
tacggctgccagaagacgacggaaggggtgcagtggcacgatcttggctcactgcaacctccgcctcccgagttcaagagattctccggcctcagccccctgagcagctgggattacaggcacctgccaccaagcccagctaatttttgtatttttagtagagacggcggtcaactcctggaactctgaatgaagcgaaaatgcgtaatttgggataatatcaaacctggcgtggtgaggaaagcccaccacaagcccgcccctggaatttctccctcctataaacccaggcaacataaataagtgtggctgggcgcccgctcctcccaaaaactcttgctgaaggacgcc

SEQ ID NO: 716 - DNA, 378 bp, Homo sapiens
cgttgctgtcggagacttcccaggaaggtccagcgccctctcagccttcgtactcagaacagccgatgatgggcctcagtaacctgagccccggtcctggccccagccaggccgtgcctctcccagaggggctgctccgccagcggtacagagaggagaagaccctggaagagcggcggtgggagaggctggagttccttcagaggaagaaagcattcctgcggcatgtgaggaggagacaccgcgatcacatggccccctatgctgttgggagggaagccagaatctccccattaggtgacagaagtcagaatcgattccgatgtgaatgtcgatactgccagagccacaggccgaatctttctgggatccctgggg

SEQ ID NO: 717 - DNA, 381 bp, Homo sapiens
cgttgctgtcgggacatggcacctttctgctgtgcctggaaaccatttaccagaaagtgacgggcaaggagctgagatacgagggcctgatgggcaaacccagcatcctcacttaccagtatgccgaggacctgatcaggcgacaggcggagaggcggggctgggccgcccccatccggaagctctatgctgtgggtgataaccctatgtctgacgtatacggcgccaacctgttccaccagtacctgcagaaggcaacgcatgatggggcgccagaactaggggccgggggcacacggcagcaacagccctcagcgagccagagctgcatctccatcctggtgtgtacaggcgtctacaatcccaggagcccacagtcca

SEQ ID NO: 718 - DNA, 344 bp, Homo sapiens
ttaaggaacggaagttaagaatgtaacagacaaagtaaaaagacggcagagttgactgctaagcctaatacttttaggcttctcatgttaccttgcttaaaattgctgtataatttcaaaaatgccccacttcagttttaaaaagtaaaataactatttaatttatttatagaattaaaagaaaaaaatagtaaatctgtgtttttgcctagaattagtccttagacactacatcaaaaaacaaatcttggccaggcatggtggctcacacctgtaatcccaacattttgggacaccaaggcaggcggataacctgagatcaggaattcatgacccagcttgcg

SEQ ID NO: 719 - DNA, 376 bp, Homo sapiens
cgttgctgtcgcaaactttggggaaaaggaaaggaaacacaggagaagttttcagcagttgccccgagctgttttgtgtgtaatgaagtggttctttgattaaggagctctatttcttatttaactgatatcccactgccccactccacaaaataggaaaatgaagaaatctttctctctgacttgtttacatcatttcacggaaacacatctttgtttgtaatgcagtattctttctctgtgtttgacagagatggggaggggcagaggaatttaagaggttttaaaagaaatgttatgtttcttatgacttgtttccactcctcgtacaatgctattcttaggtttctacgaaacctaatgttagaaccgcatc

SEQ ID NO: 720 - DNA, 349 bp, Homo sapiens
  misc_feature (1)...(349): n = A,T,C or G
nttaatctgggtgccggggacaagaagcagaggaaaaaccacactatcaagctgcaagagttggcactgctgctgcccatagccctgaagacggggaccaagaagctcacaaaggtacagggactagaggagaggggccagatttgggacgcaggtctttaaatagcagcagatgggtcaccctctcctgggaaacctggacagatcctttcagtggcagcattcatatgggaatggggctactctgaacgggaattttcgggagtctgtgaacccataactaggtgcctgggggatcctttttttggaaaggagagaggagaaaccgggctgggggaaaaaagagatn

SEQ ID NO: 721 - DNA, 375 bp, Homo sapiens
cgttgctgtcggttagtaccaagctaagagtttacttacagatgacagcaagcagatgctctagtaattcgtcagacattgcagggatattgtgtagtcagatattaccctcttgtggaaagaactacctcacatcattatttatttcccttctgttaccaacagccaaggaattacttagtgtggctccctgcatcaatactgggatatgcttaaacaagggaatgccataagagttcccaattgcctcgtcatagcctgggccatagatttttgttactgctaatcttgcttcttaaagttcacacccagtgcaaaaaacccaatcagcaaactaaccccaaaatccaatatatttagaaatgtaagtgttaa

SEQ ID NO: 722 - DNA, 341 bp, Homo sapiens
acaaagaggaattagtgaatgaataaatgaaagtctatatggtaaagctggggcatggtaggactagtcctttagaagtctcctgattcttagtttactgctctttgcaatccacagcattaacccccacatatatatgccccaggtgtagcctgactcataacatcactaaccctactaccaatggtgatgtgtaagcactttgtgctgggttaaagcttcaaacttttcttattgagattagatgatctaagcagtagagtcccttaaatcaaggttcagggccaggcgcggtggctcacgcctgtaattccagcactttatgaggccgaggtggtcgg

SEQ ID NO: 723 - DNA, 371 bp, Homo sapiens
cgttgctgtcgggctctctagctcctccctgagtgctggtgttctttgcagtgattattttgtagccatttacctgtgattcaggggccagggtgaggcccaagagtggtggtcgggcagtggacaggcgggccaggctgaaagacctctgacaaggtgctgtgtggggtgcaggtgtggccggtgtggatggcatgctgggtcgggtgccacagagtgtggtggacgaggaggacagtggtctgcagagcaccctggaggcatcgctggagctacggggcctggcccgcgttgctgataacgcccagcagcagtatgtgcgctcacgcccggcgccctcgcctgagtccatcaagagggccaaggagatg

SEQ ID NO: 724 - DNA, 333 bp, Homo sapiens
catggggggaaaagacctctctaatgttatgtagaaagagaaggagggagtgccccttctagcgtggatgcctttggttcccagatctggatttgaggggctggctctatctcttaagaagacatttacctagcattggtaatggagatggggccttaatagggctagggaggcacacccaactccagacacagctctctgctgttccccttcccagtgcacacagtcccaattcccactccagaaaattttttaaaaacatatcttaaaaaaaccccaaagagccaagcagaccctcagcttcaagggatctcctcattctctctctctctc

SEQ ID NO: 725 - DNA, 334 bp, Homo sapiens
acgtcctactgtaccagcaataagacaatatgaataccctgcaaccttaaggtgcttgaagtaagtaatacgctctcaatgagacaaaagcaacaatttggaaacaaaagtggaaattaacaatgccactggtttctgtttaaagaatttatgtatcgggctttcattgtgaataaactcagtaagcagctactcaaatgatgtgattacatggtctaggaatatactcttggtctccaaaatgacttctctatgactcctggtagtatatgaaacttagtaattaacactttctaccatttaaatcaaataaatatgtttatctctgtgaaag

SEQ ID NO: 726 - DNA, 334 bp, Homo sapiens
  misc_feature (1)...(334): n = A,T,C or G
aagctcggaaaaagaaatagaagagaagggttatgatggatttccttgatttattcagattgtgaaaacctaacagataaatttccacaaaattaaagaaaattcaaatattagatgggtgaagaagtccctccaattttaaataccagtaactcatcatttacctgagactagaaaataactagatatgcttaagatgcttctccattcttgttggtctccgggctacattctttctgataggtacctagcgtgtatattacacttcacatgtgcatggcatactgcagtgaatcaagcaatctgggagggaaaccttgccagaggagaaatn

SEQ ID NO: 727 - DNA, 328 bp, Homo sapiens
  misc_feature (1)...(328): n = A,T,C or G
tcattttatgctgccttcttagatgcaagtattcattcatcccattatttactcaatcaatgaatatttactgaatcctttctacataccagacattgaaccagacatggctcaatgaggacttggtgtagcccttgcgggagcttacagtctcagagagggaaacagtcatgtaaaaatgagtcgtggtaaaatactacaagtgtttaggatactaatgaagtgagaaaaaatagatcagatggtcttgaattctggaaggtgagctcaccagatagttgaattccaaatacatgcaatgttatggtgtgtgtgtgtgtgtgtttgn

SEQ ID NO: 728 - DNA, 329 bp, Homo sapiens
  misc_feature (1)...(329): n = A,T,C or G
gcaatgagtcttaagaaggtaacagcctaaaaccatctcagatgaaatggagctgctcagagacttttgggagctctcagacctggtggagacctctatcccaagtcaaaatgcaacactcacttcaaacagaaatatccctacaagacattaattcacaatttcaacgctttatgacctcccactatatgccaagcacttttaaagacttcagaggaatataaaaatgaatcatatttcatcttccatctgctcaaaattctctttgggtgggcagtgtggagcagcagaaaagtacgttatttgttacaggggaggtgtggatgaan

SEQ ID NO: 729 - DNA, 164 bp, Homo sapiens
ggcagacgcaggggtcggcgccgggtgagagcgtgcggccgggtgagagcgtgcggccggattcaccacaacatggcaaatctttttataaggaaaatggtgaaccctctgctctatctcagtcgtcacacggggaagcctcgagccctctccacatttctatt

SEQ ID NO: 730 - DNA, 320 bp, Homo sapiens
tcaggtgggaggatcgtttgagtctgggaggttgaggctgcagtgagccataatcatgccactgcactccagcctggacaacagagcaagaccctatctcaaaaataataaaatttaaatgttgtatagagatgtatgtaaatacatagaaaaaaactggaagaatacatttaaatagttaatagtgttcaacaattttttaccaggcacctactattggtaggtgagaatatattggtgaataaaaacccattgatcttgccctcatggatcatatgtggacaagatcagcctttctcaactggagttctgagagattt

SEQ ID NO: 731 - DNA, 369 bp, Homo sapiens
ggagatgatttggacaaatggggttttcaactttgatgtgaagggaaaaggggaagtaggggataccccttcagctgtcaggaactgggcacctacatgggaagccctagatctgcaaatgctttgagctataacaagtttgaaaagctggatgtgagacagcactctaatttaaggggatgataaaggctgggatcctaattctcaccccaaaccccaatagcatagttctatttggccaatccaaaaagcacgtgtatcttggaactgacctgtagactcccatggtctgaatgaagtgatatgtcccctaaagctttctctggctggccctaagacaattaactagtaagatagcataccagattt

SEQ ID NO: 732 - DNA, 309 bp, Homo sapiens
  misc_feature (1)...(309): n = A,T,C or G
ctctaggagcttccaggtcacttctaactgcctgcagctctcccttctcggaaccctgctgcattcaaagaggagccgtgctatttagctcttttttcttgtctttttttttttttttaaaacagggtttccctttgccccccaggtgggagagacattnccaatgaaattctaagcaggctcccttccctcttgcgttaccccaaatcctaattgtatacctaaaaagagtgggggcataatggggcggccccacaaggccagggggtttacagtacacttggtgatagaactttctacccccaccta

SEQ ID NO: 733 - DNA, 461 bp, Homo sapiens
gtcattgtctttttgattatcccatcgattccaattccgttgctgtcggtttcccggaggaaatgactattacctgacgatcacagggccttcgcaccccttcctgtcaggggccgagacattccatacaccaagcttgggtgatgaggaatttgaaatcccacctatctccttggattctgatccctcattggctgtctcagatgtggttggccactttgatgacctggcagacccttcctcttcacaggatggcagtttttcagcccagtatggggtccagacattggacatgcctgtgggcatgacccatggcttgatggagcagggcggtgggctcctgagtgggggcttgaccatggacttggaccactctataggaactcagtatagtgccaacccacctgttacaattgatgtaccaatgacagacatgacatctggcttgatggggcatagcc

SEQ ID NO: 734 - DNA, 449 bp, Homo sapiens
  misc_feature (1)...(449): n = A,T,C or G
ggagaaggcttttngatatccgcaggataccacttgcttgctcgtttggccgttagctccaaacattctacacgttgatagaaaactacgaagagggacgcttatacttgccatcatattttactctaaacccctgctactgggtcattttttgattatgcaggtaaatcccaaagcttccacaggctgctctagtattctatcgggcattttattccaaaactttttttttactttttactatatgcctagcagaggtctaaaacctttatacacattaactgacttaatcttgaccagatctgcggattcagtacattttactcccattctggagcttacgtaaatgaaacactgacacgctgatagtcatgtgttagagtcacgatttgaacctacgtaagcttggctgcaaaaactgtgttctcaaatgtctgtacttttatatg

SEQ ID NO: 735 - DNA, 450 bp, Homo sapiens
tgacgagcacatggactttctgcgcgatgcccttcaggaccatgcgtgctacttggtgcagaagaccaccgaagggacacccacctgcattgtgagctctatggctttgaaaattacgacacaattcttttacgactcctccccttcaccatttgtgtccacattaccattgctactgtctggcatagcagtcctttttataaatctaccctaaggctccttccatcttgtactgtttcctttctccctcccatctgctccagaagaaaaaaatatatatatactacagaatccacccttgcctcactttatgatgacggcattccctatggaagccctatgctccttttcacacacacaaaaaatggaagtaatattattttctttgaaaatcatcaatcctcctactatgacatatggaaagcaaacagctgtacccacgaaaggtac

SEQ ID NO: 736 - DNA, 416 bp, Homo sapiens
  misc_feature (1)...(416): n = A,T,C or G
ctatcttagaacaagttaaatagtatatgtacttgtaataacttgtgactagatatgttagttttgtctattaatttttctgttaaaaagaatatgcattgaaatgagatggaaaacaaaatgaaaagtgtttaaaaaattaaatattttagaaggatcaatatcctaagggttgtgggtaattctttcctactttctaaaacttcagattcctttcactcacttaaggttgtactaccattaatgcaatgttttctgggagtgcaagatttgcanatgaattaataacagctagaagcctcactatttgcacttttataacattctttgcttgtatcattacaagggtaaattatatagtaataggtggaaaaaagtatcaaaaatcagtgaaaaccacatgggattcatatggn

SEQ ID NO: 737 - DNA, 412 bp, Homo sapiens
  misc_feature (1)...(412): n = A,T,C or G
aagttgcctcagaatgagacacactctttgacttcacatgcaacagaaaggcacagttttatttcaaacaaagcagtgttttgctgtaacaccgttaaaaactggaaaggaaaactcaatcaaaccaaaaactagatgcttaggaataaatggtagaattcttacaaaaccaccacgcttcaattcaatctaaatcaattcaacaaatctgtgctgaaagtataacatttagttttcttagacaccanatgaacaatacaaaatccctcaagggacttagaacattcaagttttctatatctgtggttctaagtctgttaccaacttccaggactctgcttctttccctctgcccattaacaatgcgngtgttaaagtgacttcctaccactatagtttttacagctgattc

SEQ ID NO: 738 - DNA, 441 bp, Homo sapiens
  misc_feature (1)...(441): n = A,T,C or G
tcgatctcaattccgttgctgtcggcggacgccttccttctgaagcgagccaccgagaagataagcgaggacctcagggccacactgaacgccttcctgtaccgcacgggccagcacagcaacaagttcatgctggtcctggccagcaaccaaccagagcagttcgactgggccatcaatgaccgcatcaatgagatggtccacttcgacctgccagggcaggaggaacgggagcgcctggtgagaatgtattttgacaagtatgttcttaagccggccacagaaggaaagcagcgcctgaagctggcccagtttgactacgggaggaagtgctcggaggtcgctcggctgacggagggcatgtcgggccgggagatcgctcagctggccgtgtcctggcaggccacggcgtatgcctccgaggacggngtcctgaccgag

SEQ ID NO: 739 - DNA, 403 bp, Homo sapiens
ggaagcgtcggcgacgcatcgcgcgatggcgcgggcgggacagtgcttgtgaaactgaacacaacaaaagtatggatatgggaaaccaacatccttctattagtaggcttcaggaaatccaaaaggaagtaaaaagtgtagaacagcaagttatcggcttcagtggtctgtcagatgacaagaattacaagaaactggagaggattctaacaaaacagctttttgaaatagactctgtagatactgaaggaaaaggagatattcagcaagctaggaaagcggcagcacaggagacagaacgtcttctcaaagagttggagcagaatgcaaaccacccacaccggattgaaatacagaacatttttgaggaagcccagtccctcgtgagagagaaaattgtgcc

SEQ ID NO: 740 - DNA, 430 bp, Homo sapiens
  misc_feature (1)...(430): n = A,T,C or G
ccatcgattcgaattccgttgctgtcgcccagaagggtctgcatgggccatgagcgggcactcccaatacagcttaccgtacaggctttggacatgccggaggaggccatcgagactttgctgtgctacctggagctgcacccacaccactggctggagctgctggcgaccacctatacccattgccgtctgaactgccctgggggccctgcccagctccaggccctggcccacaggtgtccccctttggctgtgtgcttggcccagcagctgcctgaggacccagggcaaggcagcagctccgtggagtttgacatggtcaagctggtggactccatgggctgggagctggcctctgtgcggcaggctctctgccagctgcagtgggaccacgagcccangacaggtgtgcggcgtgggacaagggtgc

SEQ ID NO: 741 - DNA, 437 bp, Homo sapiens
gcaggatcccatcgattctaaatccgttgctgtcgcacagagccaactaacgacagctatggattatttgcggttgtgatgcatagtggcattacaattagtagtgggcattacactgcttctgttaaagtcactgaccttaacagtttagaactagataaaggaaattttgtggttgaccaaatgtgtgaaataggtaagccagaaccattgaatgaggaggaagcaaggggtgtggttgagaattataatgatgaagaagtgtcaattagagttggtggaaatacacagccaagtaaagttttgaacaaaaaaaatgtagaagctattggacttcttggaggacaaaagagcaaagcagattatgagctatacaacaaagcctctaatcctgataaggttgctagtacagcgtttgctgaaaatagaaattctgg

SEQ ID NO: 742 - DNA, 428 bp, Homo sapiens
cgttgctgtcgctgtcacagacacatatttggatttgtgattttattctcctggatggacaattgtgatggattttttgggttccgggcttcaagctttgcaatctcatcttctttgcccttcctcttgccataatggaagaggcgctgctaatttgggttccatcctttcctgctttcacagactgccctgtgatttcctaaaacatttccattagtttgtttgaattctctgattttcttcccttagggccctccacaggcctctgtgctagtgccttgaatgatggcaagcgtacaaaaaatattttttttctttttaaaaacgtttttgttccggccccccatgcttgtgagcccaattcatctctctcgcacgttatttccacccctctaccccctcagctttccagcgtgctcatcaggggg

SEQ ID NO: 743 - DNA, 424 bp, Homo sapiens
  misc_feature (1)...(424): n = A,T,C or G
cgagtcgtacaattttgtaanganccggagcccacgattcgaaggtccttgctttcgggaagaatattctacttatcacaccagagcttccaccgacagggggggggacgtaacacaccttggttcccctccggctttccttccccttctctcccgccttctccttaatcataccaaaagcgcctcagctctgattggctggagctctgtgctatctcagccaatcacaagccgggctgtgctcctacaccatccgaagagcgaatcgtgcagagaccgtgtctacgattggcctctccctgacaaggatttaattatgaatttttctttatggcgtgggagaggccacagcccggactccatcgactcccccggctcttagactaaaatcatgcccaagtgcaaacaacgaagacgaaagcta

SEQ ID NO: 744 - DNA, 429 bp, Homo sapiens
cccatcgattcgaattccgatgctgtcggtggctctgtatggccagtaactgggactcgagctttcagattctcaactagccttggcaaaacagctgtaggtggcctccctgacaacagacactcagacctccccaccctggctctccttgcatttccccatgctccccaccccctggcaaaaggctggccatgctctgttcccagcagccgcgcaggtttccccactggctgcaatggccctaccaaaagccatgttgcatatccgttgtaagcacgtgccctgtgccctgtccccattccttatgccctatgaggccaagctggtgtctctaggagggcccacacaggcaccctggatcccccagagagtaaattggtgtgctcaggccgcaggctgactcataggtagggcagtgggctctgcagg

SEQ ID NO: 745 - DNA, 423 bp, Homo sapiens
  misc_feature (1)...(423): n = A,T,C or G
cgttgctgtcgggctgcggccggtttggcccttctttgtaggagagtttcatccgccctgaaatcttgccgatcgttaataactcctcaggtccctgcctgcacagggatttttcttattttgttgcctaaaagcacaccaaatgtgacatcctttcaccaatatagattacttcataccacattgtcaaggaaaggactataagaattttttgatgacccaaaaaactgggggcaagaaaaagtaaaatctggagcagcatggacctgtcagcaactaaggaacaaaagtaatgaagatttacacaaactttggtatgtcttactgaaagaaagaaacatgcttctaaccctagagcaggaggccaagcggcagagattgccaatgccaagtccagagcggttagataaggtagtagattcn

SEQ ID NO: 746 - DNA, 252 bp, Homo sapiens
aaataaaataaaataaaataaaataaaataaagataaatcaggcagttcagtaactgaattctccccatcacaaaaagatttttcattttacaagtattcatcaactacaattgaactgtaggaaaacactttaggtagtgttttcccctgggttatacctctttttctaggttaacttttactggtcctaagcatttggcacttcaaaaataccattttatggtgttgggaaaactggcttaccgcatgca

SEQ ID NO: 747 - DNA, 391 bp, Homo sapiens
cttgtgtggtgcactgtgctcctgtctttagggacccgtgaagacaaacttcttccttcatgatagtcatttccatgcgtctgtgtccatactatctctggttaaaacaaatcccaggtacattttaaaacacggatggtggtagatcttgcatggaatggtgatctagtcacatatattttatatactctggaaatgatgcaaaaattggctacaagaaagcttatatctctccttgtaatcttctataacaattttaaactaactttttctacatacagcatgttgtttcctagatgaggcgatgaaattctttatgcagcaagagttttccagtatatttcaaaataccttattgtgaatgtttttgaaatgtgtaattactatctga

SEQ ID NO: 748 - DNA, 391 bp, Homo sapiens
ctcaacacacccaggtttttttgttctctctttctctctggcctcaattccatgccttactacttgattgttgtatgctaggattgagggaatatgcatgcaaatactagacaaagcacttgagggaggccttctcccacagtactggtggctgtgtaatagatgttctcaattaccaagtgcttaaactgagccctatgtacttaggcagcctgtttagagttcttacccacttgccaatgacacttgactgctgaatccaaatatgaaaaaaactatagatagattcaaggaccaaaattatggatatgccactgaaaatgtatggtagagtaggccgggcacagaggctcatgcctgtaatcccagcacttttggaggctgaggcggg

SEQ ID NO: 749 - DNA, 258 bp, Homo sapiens
ttagatgatggatatctagaggtgtattatatcattggctctattttgtatgtttgaagtttccatagtataaaacttaggaaagttaatttaaacagacaaataccccatcatgaaaatggataatcaaaaggaactcttgataatgaaagaactaaaagtggccagatgttttcaaatgcttagctttactactaattcttcaatgttagttttacaaacaaagatgatacctcttgctgggcactgtggctcact

SEQ ID NO: 750 - DNA, 390 bp, Homo sapiens
  misc_feature (1)...(390): n = A,T,C or G
taataactataatttattcagtacctttttacataatggaccttattcttaatgctttatgtacattaacccatctgaccctcatgacgaattacctatagcttattatgcccatttttcagataaaaatgaggttcatgaacatatatattttgcacacatgtatttttaataatttcaggccaggcgtgatggctcatgcctgtaatcccaacactttgggaggccgaggcagatggatcatctgaggtcaggagttcgagactagcctggccagcatggcgaaaccctgtctactaaaaatacaaaaaaaaaattaaccgggcatggtggtgggcgcctgtaatcccacctattcgggaggctgaggcgggagaatcgcttataccn

SEQ ID NO: 751 - DNA, 386 bp, Homo sapiens
aataaataacttatgtatcgtcggaggtttttactgcggagagagctgtacgtaattggtgcaccacacagatgctccctccaggactgaaggacttacccctccagctgctgggattatagttggctgacactctccagcagctggcagtttccaggaactgcctgtggctgaagagaaccaccttactcagagttctaccctcctcctaggggcagctgcatccaatgactggcctatgtggaggtataaatccatcttgccaatattcatacttatttacataatttacgatattcatacttaaagattctgtgcccttacccaactcaggataggctaaaagaactagcccagcttggccgggtgcactggctcacgcctgt

SEQ ID NO: 752 - DNA, 414 bp, Homo sapiens
ggcgttggtgtcgaaaccgttgagtttctaaatatttatttattctaacaaaaagcaatgagtacggggggatgacacatttaatgaacacaattttattttttttctgtaactgtgcttgttgaatgtcaatcatatttaaagggaatgactttgaagtaaaaccttttttcttgctactgaaaaaaatggagttgttttgggtggtaaagtgttaaggaatagggacagctggtcacacaaggaactcttgaaggccacatgtgaaaacctgtcacttgcacagaggccagtcccactaaggtgaccagagtgggctccaagcacaaactgccattggctatagatgggactgtgtccccccaaaattcatgtgttggagccttaaccctcaatgtgatggtatttgagatg

SEQ ID NO: 753 - DNA, 416 bp, Homo sapiens
cgctgctgtcgacttcgtgaaaattatttaggaggaagagccggaaggaaaaccaagtgatgcataaagttcggagagttcagatgatgaaaaagcctgggttgaagaggtcaggaagcaacgcagactcctccagcaggaggaaaaagtgaagcggcaggaacgactcaaggaggaccagcagacagtcctaaagccccagttttatgagatcaaagcaggagaagaatttagaagcttcaaagattctgccacaaagcaaaaactgaggaacaaaacccttgaagatcgtttgaaaattgaagcaaaaaatgggacattgagtgtattcgacaccaacgttgggagcaaacaattgaccttcacgttaaagaggtctgaaccgcacaataaagcatcagggaggctgggaaact

SEQ ID NO: 754 - DNA, 388 bp, Homo sapiens
tgcaatgttttgtagggccagaattatttcacacacataagtatgattttccccaaccagaccacaagctcttcaaggttaacaacaccctcgcccaaccccctccccctcaaacaattcttctgctctcctagagcagactttgatctaaattggatctaaattgactcgaaatgtcaggaaaaagagattaatgcacaaggtccctttctctgagagaaggtgtgatagagcagagcttaagcctgggtgggaaatgaaactgcccaccactctctccaccccgccttggtcttccgagggtgacaggtgggacgctgaagagagctgccctcctggtcccggcctccatgtgaacagcctcctcccaaatcttcctttggatctg

SEQ ID NO: 755 - DNA, 415 bp, Homo sapiens
  misc_feature (1)...(415): n = A,T,C or G
cgttgctgtcgctccattttcgtctagcagtggaagaagactgaatatctcgtataccagaaacatgactcttaaagatggtaaaaacaatgtagccatagctgtaacgtataaccatgatgggtcttatagcatgcagattgaagataaaactttccaagtccttggtaatctttacagcgagggagactgcacttacctgaaatgttctgttaatggagttgctagtaaagcgaagctgattatcctggaaaacactatttacctattttccaaggaaggaagtattgagattgacattccagtccccaaatacttatcttctgtgagctcacaagaaactcagggcggccccttagctcctatgactggaaccattgaaaaggtgtttgtcanagctggagacaaagtgaaa

SEQ ID NO: 756 - DNA, 414 bp, Homo sapiens
cccggaacctgggtctgagccctgctcaggtttgtcccagccggctcagcgcagctggctgtgtgttgctgctcctacagctcaatgcactggaccttctcgtccagcctggatgcctctatcatttctctttgtctttctctggcctccataccgttctgaagagctcaccttcctctaggttcctcctgccctgctcttcccaagtgacccagccctcacctgtagggcagccaaggctggtggtgcagctgcccccagtgaaggtcattgggcatcgcactgggcagtgcagaggtccaggctgaggagttgagtggcgcgcccatcctggcgcctgtgcagagaacgggaggggggcccctggcttggatcctagaatcggggaagtctgagggcccccctgcagtctca

SEQ ID NO: 757 - DNA, 415 bp, Homo sapiens
ggcacgagcagccccaggcccccgtgctctctgccaggaggtgccttgccacttggcatggccccagtcacgggtggcacatctggggtgaatgcacgtcagtggaggcagaatcattctgtctgaatgaatggagtttccaggcccccactggccctctgtgtgagggtctgcagggtttggcaggacaggtctttctctccggcgagagcacccaccctgaccggctgctggatgagggcaccaaagctcgctagggagggctctgtccttatggaggagctgcggaatccctgcagctgtgcccccaggccctgccttgcacactttctgcagccagggcgcccctggggaggtcagggcaggccggggaggctgagggccacctggcatagtgggcaggcgggggagccgt

SEQ ID NO: 758 - DNA, 413 bp, Homo sapiens
cgattcgaattccgttgctgtcgcccacacagggcacatattccacgcaccccacacggggcaggcagctcacacagggcacagaccccacgcaccccacacagggcacagaccccacgcaccccacacagggcacagaccccacacaccccacacagggcaggcacctcacacagggcacagaccccatgcatcccacacagggcaggcaccccacacagggcacagaccccacacaccccacacagggcaggcaccccacacagggcacagaccccacgcaccccacacagggcagggatcccacgcagggcacagatcccacgcagggcagggccagcccaaggccaagccccttccctgtagatcttctcccaggcaggaccagagccacagtcactttcacactatct

SEQ ID NO: 759 - DNA, 418 bp, Homo sapiens
cgttgctgtcggtttcccggaggaaatgacaattacctgacgatcacagggccttcgcagcccttcctgtcaggggccgagacattccatacaccaagcttgggtgatgaggaatttgaaatcccacctatctccttggattctgatccctcattggctgtctcagatgtggttggccactttgatgacctggcagacccttcctcttcacaggatggcagtttttcagcccagtatggggtccagacattggacatgcctgtgggcatgacccatggcttgatggagcagggcggcgggctcctgagtgggggcttgaccatggacttggaccactctataggaactcagtatagtgccaacccacctgttacaattgatgtaccaatgacagacatgacatctggcttgatggggc

SEQ ID NO: 760 - DNA, 405 bp, Homo sapiens
  misc_feature (1)...(405): n = A,T,C or G
cgttgctgtcggatcatttgaagcaaacctcagaaatcactttattcctaaatatttaagtatgcatctctaacttattaaaatttttttggttttgttttttgtttttctgagacggaatttcgctcttgttgcccaggctggagtgcaatggcgcaatcttggctcgctgcaacctctgtctcccaggttcaagtgattctcctgtctctactaaaaaaacaaaaaaaatcanctgggtgtggtggcgggggcctgtagtctcaactactcgggaggttgaggcaggagaattgcttgaacctgggaggtggagattgcagtgagctgaaatcacgccactgcactcgagcctgggcaactgagcgagactctgtctcaaaaaaaaaaggccaggcttggggg

SEQ ID NO: 761 - DNA, 378 bp, Homo sapiens
tttggtattgccgttattattgttgttaaactgactaaaatcatacatggaataatagaaatcaggcctaacatcagatagacttttccattcagttaagttattgtgtagcaaaatttattttgtcagttcactacacaatgtgacagtatatagtttctctaatagagtaacattaaagaggacatataatataaccaaaaatttgagttccagataagtttggtgtctcactagcaagatgacgttaaataactcatttaatttttttgaaatcttaattttctgttctgtaaaaaaaaaagcaatctgtctcttgtccaaaagactatgtaggttttttaaaaattttttattatgtcatatacatgtgcatac

SEQ ID NO: 762 - DNA, 353 bp, Homo sapiens
cgggaggctgaggcaggagaatcgcttgaacctgggaggcagaggttgcagtgagccgagattgcaccattgtgctccagcctgggcgacaagagcaaaacttcatctcatagaagaaaaaaccaaaactccagtttagcaaaaaaaaaaaaaaaagctcccccggcccggggggaggggtttatggctaaaatcccaaacctttgaaaggttgggggaaaaagatacctggaccccccgggtgggaaaccgccgggctataataggggatacccgtttttttaaaaagttaagaataagggggggggggggggggataccccttagaacccgagattttggaaggcccgggg

SEQ ID NO: 763 - DNA, 405 bp, Homo sapiens
cgttgctgccgaatcgtgataaagacaaagaacttttaaaattaactcactacctcaaggagatagcaaaattagatgactttttggatctaaatcacaaatattgggaaagatatctctcaaagaagcaaggacagtagttacaagttatactggcagttattgaagatacttaagatccaagaacttcttgcttttatgctagaaatcattatgatagtgctggacactgaagcaaataccatactgcttatacttggtcttccagttttttgtaaatttaattttatattttttgaagatgatagcaatatgctaaaaaatgcttgtcccctatatgaatattctgttacgcttgaaaaatattttctccagcgttggttactgaccaccccaccctcccac

SEQ ID NO: 764 - DNA, 409 bp, Homo sapiens
ggcacgagagagtccgtaggtttatcatattatcaaggaaaactgtgacccaaagaagtttaggaatcacatacagtgctgctggctttttgtgcttggcaaatgagtgacaatagaagaaataatttttcttacacattttaaaacgatttctcttccttgtgattgaagatgaaaggagtaagaaattaaggcatttgtttaatttatactggcaacttatttaggggggaggggacatgaaggtaggtaaataggtaggcctctaattgaaccacctctctaagatatgtacgtatatataagctgatattgtgtttgacattctgaagggtttctttttctttttccttttttttttttttgggggggggccgggggctaaaaacttttttttttgacccccggc

SEQ ID NO: 765 - DNA, 381 bp, Homo sapiens
atcattctttgaaaactgacaggaaagatacaacttagaaaacattgtggatgaatacttcccccttttgcaaatgatattttggaagcacaaaagaaaaagctctaatacaaatattcataatgaaaatatgaacttaataataccaatggcaagacagaataattaggagaaatcgggtaacgagcatctctcctatttttagtttgtaagccttttttgctttttttttttttttttttgaaaaaaaagtttatttttttgccccagaaggccagggaattaatttggcttaatgggagcctcaccctccggggttaaaacatttttctggctaaaacttccaagatatttggaaatagggggcctcccccccccccg

SEQ ID NO: 766 - DNA, 405 bp, Homo sapiens
cgttgctgtcggccccggcagccgatgagtgtgactaccgggatgaacagacatgcgcccaccagatgattgtttaaccgggagtttatcaatactgtggaaagagaacgccttggagagctgctgacagctatattaattgaatgaggctggaaggatcacgtgaaggcactctgtaaagataatgattataaatgatatgattcggtttttgcttttgcataagaggctgttagagagataggactataacacgttactgttgttgacttggtggctgaaatcactccaaaaggcagagccctggtacctgacagtgtaaagaaggagctcctacaaagaatatgaacattccttgctcagcatgccagcctttaagattgaattagattgggttgttgtggg

SEQ ID NO: 767 - DNA, 381 bp, Homo sapiens
gcattttgatgtgtagaatcaggggatccaggatcatcaccaaggtcattttcccagacagatgtgctgaggctgtagaaagtgctttttatttggttgggagcttgtgcataaatgcgagaggggctgcacatctgacggactagaggtgactcatggctgaaccggaacaggacatcggggagaagccagcagagcttgtgtttaaagtcagaattcagaaccccaaagaaaatgacttcattgaaattgaactgaagagacaagaactgagttaccaaaacctactaaacgtgagttgctgtgaactggggattaaaccagaacgagtggagaagatcagaaagctaccaaacacactgctcagaaaggacaaagaca

SEQ ID NO: 768 - DNA, 406 bp, Homo sapiens
cgttgctgtcggatggctccccctatgaaagttgtccagtgagcagggtcaaggtttatgtttggggtacggacatgagtgcaggagccttactctcctgtgtgttgtcagggatggataaaggggatgaagttggaggggtttagtgaatggttgggacagcaaatttcagagaagagcatttggaaataattttctcaaatatatatttttaaaatccatatttgatttttttccctcagggattcccaagcatagtagagctaaaatgaattaatttgggtaaaagtaaagttaaggctaagttaggaaacacttttaaaaacaggaacctgctgcgtgcggtggctcctgccttgtggtcccagcactttgggaggcaaaggcgggtggatcacctgagatg

SEQ ID NO: 769 - DNA, 388 bp, Homo sapiens
agggtactgtttcttcctttccaaaggccacagggagaccttgtaatctgctttccagagcctttgggaaagtggtcaacaccctgccttcttaggaagagcccagagaaacagagggctatcccgggggttttgtttatctgcccttgtggagttggcagacgtgggcttctgtcttccctgctatggcctcagagctttagatcctgctggtttagggaatttgaatctttcctgttagggaaaaatgagtgcttactgtgctttgtagaaatattttcagaattcattttctttaaattattttcattgtctttaaattatatctaaacaagtataccatagctttcctgagagggaaaacaatctatccaacacattgtgcact

SEQ ID NO: 770 - DNA, 382 bp, Homo sapiens
  misc_feature (1)...(382): n = A,T,C or G
cctactaggtcaagtgagtaccaaggacagcgtggcaggtgaccatacagacgcctgaataacaggaggcatgctgcattgaggcctacctttggaaaaagataccacgatgctttaacaaccgtggttaatagtgttcatgcctttgttaattgtactcatgaagtagtaataaaggttaatattctccattggcattatcaaatattaaagtactggccaggcgtggtagctcatgcctgtattgccagcaatttgggaggctgaggcaggtggatcactagaggttaggagttcgagaccagcctggccaacatggtgaaaccccgtctccattaaaaatacaaaaaaattaccgagatgtggccaggcacggtggctn

SEQ ID NO: 771 - DNA, 411 bp, Homo sapiens
cgttgctgtcgggctggtcttgaactcctgacctcaggtgatctgcccgcctcagcctcccacagtgctgggattacagggatgagccaccacgcccggcccatttttttttttgacaacttttttttttggaaaaggggtttggtcccttggccaaaatgggagggcggggggtaaataaaacttaatggggcccagaattcttttggcctaaccccccaaggagttggaaacaacggggggaccccttaggccgggcaagtttttcattttttggaaaaaaaaggggttttttttttttaaaaaggagtttccttttggcccccaaaggggaggggggagaccggggccaacctaatggggagccccccccccaagggataccccatatttgggcgcaaaaattagggg

SEQ ID NO: 772 - DNA, 410 bp, Homo sapiens
cgttgctgtcgcacagcccagccccctccagagccctgccccaccgcaccctgcttctccagggcctagcagaccagcatctgccccggtgaagggatggatcagctgtgggggtgggtgcagaaggttgccacctcctacctcagcgggagtcacctaggaaagatggagggattgacactattttctcaataaaatgggacttttttttttttggggggaaacttcctgttcccaattgcataaaaaaccctttttgggcccaaggttcccaaaaatttttaaaaaccccatttggtccttttttttggttggggggggccccaggccttctggaagggatttaaacggggctgacggcttgaattaaaggggggatgggaatcccggaacaaaaaaaccgggaaccg

SEQ ID NO: 773 - DNA, 383 bp, Homo sapiens
ccgccctgcgcccggtcccggcctttccctgccctctggccggtcctcctcccgcggccgtcccgggacctgtgcccagacccctggggccacgatcacgccccagccgcccaagtcaccgcccctcccctcccttccagcgttcccgcccgggcggtgtatggtggctccggtgtatggcggttctcgcacgcacagccgcaggggtttcctctcctagactcgaggcggaggcgcacctgcaccctctaaaactcccccgtcggccctcgcggactatcgggaggcgcggagggccgagctgacgtgcgtgcgagcgggcgccatgaaagcgcggagccgtcctagggctaagcctttctttaacagggggaggcccacga

SEQ ID NO: 774 - DNA, 410 bp, Homo sapiens
  misc_feature (1)...(410): n = A,T,C or G
cgttgctgtcgcaggaagtcattagcagagtgatttccagaaggcgtagaatttagtgaccaaggttctttcctttttgggaggagaaagtgaaaactaggatgctcagctggacccaccagcctgagattctggggattttagagctgtcccttggggagccaagcacttgggggtggaggtgatagcgaggctgatggcccctgtgttctcagctctctgcctgggtagcccctgggtgatgggggagaggccagctgtcacgtggggtatcaggtggctctgccagaaactcccttggcacacagagcactgggtcggccctcgggtgtggctgtttgggcaggacagccctctgtatgtagccttgagcaggtaagggggccaccttgagtgggtggnccagaaan

SEQ ID NO: 775 - DNA, 409 bp, Homo sapiens
  misc_feature (1)...(409): n = A,T,C or G
cccatcgattcgaattccgttgctgtcggggggatcttgcaaaatgccgatttctggcaaggcatcaggtgatggtgaagaaagttttgagtaccaagaggtagagtagtggttcttagactttaaaagctggacacccccaccagtgcttttgattcacctcactgggtggggcctgcagatttcattttaaacaggttcctaggtgatgctaatgcacatgaagggcagggtgtgttctgagagccactgtggtggagtagaaacaaccgaggagaatcaagcccatccatctcatcctggcttcttgagcattatttcctttttctttgnttttgatttgagacaggggttcactctgtcactcaggctagagtgcaatggcatgatcctggctcactgcagtctn

SEQ ID NO: 776 - DNA, 408 bp, Homo sapiens
  misc_feature (1)...(408): n = A,T,C or G
ggcacgaggttgactgcagagtgaaacatccttgcaatctcttcccacctccttcacgacactgagttgccatgtgaggttcttcaagtctgagagtggaagggatccctatggagactcctattaaacccctattagaggaagagattgagagacctagcaatgtgaagtaacaaagatcaggcagctgcaagtgactcctgaatcttgagtccagggctttcgccactacagtacagtggttttcttttctttggtcggggagagtgggctggaatggagagtgaggcccacaaattacctgcagagacgtggaggcgtgagggagaacatgcttgttaaatatgcaggtagattaggagacaccaaacagagattcagacacagtaaggctgggatgagatcctn

SEQ ID NO: 777 - DNA, 408 bp, Homo sapiens
  misc_feature (1)...(408): n = A,T,C or G
cgttgctgtcggaacagcactgctgggctggagacggcgggagccgctgctctccggctgagggaatcagagacagctccgtccctagtggagcgcaggggaggcagaagtcatgacaggcgaggtgggttctgaggttcacctagaaatcaatgacccaaacgtcatttcacaagaggaagcagatagtccttcagatagtggacagggcagctatgaaacaattggacccttgagtgaaggagattcagatgaagagatatttgtaagtaagaagttgaaaaacaggaaggttctacaagacagtgattccgaaacagaggacacaaatgcctctccagagaaaactacctatgacagtgccgaggaggaaaataaagagaatttatatgctgggaaaaatacaan

SEQ ID NO: 778 - DNA, 405 bp, Homo sapiens
cgttgctgtcggctctgaggggctccttgccagggctgtggtccaggcggcctcggcccccctggggctgtggacaggagctctggctgtcctacgtagcttgtggagccgctggggctgcagccaccggatctgctcccgggtgcacctagctcagcccttttccctgcaggaatacatcgtcagtgccagaagctgctggggcggcagacagaccctggagcagctactgcagcccatcgtgctgggccaatgtactgctgtcccagacactgagaaggagcaggagtggacccccataactgggcctctcctggccctcaaggaagaggaccagctcctggtcaggagactgagctgtcatgtcctgagtgccagtgtagggagctctgcggtgatgagcac

SEQ ID NO: 779 - DNA, 406 bp, Homo sapiens
ggcacgagagcaccggcggttgcatttttggccagtcgcctttgcccgcgccccccgggtgccccatcactggtctctacaacaagagtccctactactgcgggacttgtggccgctggttccgcgccatggcgggcttgcgactgcatcagcgggtccatgcccgagctcggactttgacgctacagcctcccagatcaccatctcctgccccacccccacctccagagcctcaacagactatcatgtgcacagagctgggggagaccatcgccatcattgagacatcccagccactggcgcttgaggacaccctgcagctgtgccaggctgcacttggggccagtgaagcaggcgggctcttgcagatggacacggccttcgtgtgacgccaactaaaagcaac

SEQ ID NO: 780 - DNA, 411 bp, Homo sapiens
cgttgctgtcgccgccgctaccgtttcgagggcgagggtgacatacagcgtttccagcgggactttgtgtcccgcctgtggcttcacataccgccgggacttcccgccccttcctgggggctgcctgacctcggactgcggctgggggtgcatgttactcagcggccagatgatgctggcacagggccttctgctgcatttcctgcccatagactggacatggtccgagggcatggtcctgggcccccctgagctgtcagggtcagcctctcccagccgtgaccatgggcctgcccgctggatgcccccacgctgggcccagggtgcccctgagctggagcacgaacgccggcaccggcagattgtgtcctggatcggcgaccacacacgggccacctttggcctactccc

SEQ ID NO: 781 - DNA, 407 bp, Homo sapiens
  misc_feature (1)...(407): n = A,T,C or G
cgttgctgtcgcttttcccactgaaacacacccaagtatatgcccagccttcatgaaagtgaacagagaaacgaagcgcctttatgtgggtggccttagccaggacatttctgaggcagacctacaaaatcagttcagcagatttggagaagtttcggatgtggagatcatcacacggaaagatgaccaaggaaacccacagaaagtttttgcatatatcaacatcagtgtagcagaagcggacctgaaaaaatgtatgtctgttttaaataaaacaaaatggaaaggtggaacattacaaattcaactagcaaaagaaagctttctgcacagattggcccaagagagagaagcagcaaaagctaagaaagaagaatcaacaacaggtaacgccacactcgttagan

SEQ ID NO: 782 - DNA, 405 bp, Homo sapiens
ggcacgagaccatggcgtccctcttcaagaagaaaaccgtggatgatgtaataaaggaacagaatcgagagttacgaggtacacagagggctataatcagagatcgagcagctttagagaaacaagaaaaacagctggaattagaaattaagaaaatggccaagattggtaataaggaagcttgcaaagttttagccaaacaacttgtgcatctacggaaacagaagacgagaacttttgctgtaagttcaaaagttacttctatgtctacacaaacaaaagtgatgaattcccaaatgaagatggctggagcaatgtctaccacagcaaaaacaatgcaggcagttaacaagaagatggatccacaaaagacattacaaacaatgcagaatttccagaaggaaa

SEQ ID NO: 783 - DNA, 406 bp, Homo sapiens
cgttgctgtcggggctgcagcggcgctgtctttatttgaacgacgtgaaaattacttttcccactgaaacacacccaagtatatgcccagccttcatgaaagtgaacagagaaacgaagcgcctttatgtgggtggccttagccaggacatttctgaggcagacctacaaaatcagttcagcagatttggagaagtttcggatgtggagatcatcacacggaaagatgaccaaggaaacccacagaaagtttttgcatatatcaacatcagtgtagcagaagcggacctgaaaaaatgtatgtctgttttaaataaaacaaaatggaaaggtggaacattacaaattcaactagcaaaagaaagctttctgcacagattggcccaagagagagaagcagcaaaagg

SEQ ID NO: 784 - DNA, 408 bp, Homo sapiens
cgttgctgtcgaaacttgctgtagaagaaaccaaaggggaacttctgttgcaactatgtcgtttggaagatgctgcagatgtttatagaggattgcaagagagaaatcctgaaaactgggcctattacaaaggcttggaaaaagcactcaagccagctaatatgttagaacggctaaaaatttatgaggaagcctggactaaatatcccaggggactggtgccaagaaggctgccgttaaactttttatctggtgagaagtttaaagaatgtttggataagttcctaaggatgaatttcagcaagggttgcccaccagtcttcaatactttaagatcattatacaaagacaaagaaaaggtggcaatcatagaagagttagtagtaggttatgaaacctctctaaaag

SEQ ID NO: 785 - DNA, 408 bp, Homo sapiens
cgttgctgtcggaaaagcagatttgtgataaacttgctgtagaagaaaccaaaggggaacttctgttgcaactatgtcgtttggaagatgctgcagatgtttatagaggattgcaagagagaaatcctgaaaactgggcctattacaaaggcttggaaaaagcactcaagccagctaatatgttagaacggctaaaaatttatgaggaagcctggactaaatatcccaggggactggtgccaagaaggctgccgttaaactttttatctggtgagaagtttaaagaatgtttggataagttcctaaggatgaatttcagcaagggttgcccaccagtcttcaatactttaagatcattatacaaagacaaagaaaaggtggcaatcatagaagagttagtagtaggtt

SEQ ID NO: 786 - DNA, 409 bp, Homo sapiens
  misc_feature (1)...(409): n = A,T,C or G
cgttgctgtcggccccgcccaggcggctgcccgtgacctgcctgggcgcggggaactgaaagccggaaggggcaagacgggttcagttcgtcatggggctgtttggaaagacccaggagaagccgcccaaagaactggtcaatgagtggtcattgaagataagaaaggaaatgagagttgttgacaggcaaataagggatatccaaagagaagaagaaaaagtgaaacgatctgtgaaagatgctgccaagaagggccagaaggatgtctgcatagttctggccaaggagatgatcaggtcaaggaaggctgtgagcaagctgtatgcatccaaagcacacatgaactcagtgctcatggggatgaagaaccagctcgcgggcttgcgagtggctggttccctgcagan

SEQ ID NO: 787 - DNA, 410 bp, Homo sapiens
  misc_feature (1)...(410): n = A,T,C or G
cgttgctgtcgggccccgcccaggcggctgcccgtgacctgcctgggcgcggggaactgaaagccggaaggggcaagacgggttcagttcgtcatggggctgtttggaaagacccaggagaagccgcccaaagaactggtcaatgagtggtcattgaagataagaaaggaaatgagagttgttgacaggcaaataagggatatccaaagagaagaagaaaaagtgaaacgatctgtgaaagatgctgccaagaagggccagaaggatgtctgcatagttctggccaaggagatgatcaggtcaaggaaggctgtgagcaagctgtatgcatccaaagcacacatgaactcagtgctcatggggatgaagaaccagctcgcggtcttgcgagtggctggttccctgcagan

SEQ ID NO: 788 - DNA, 410 bp, Homo sapiens
cccatcgattcgaattccgttgctgtcgagattagtgccattggaaggggcatatgtgtgttgctgggtatttccctggaggatacgcagaaggaactggaacacatggtccgaaagattctaaacctgcgtgtatttgaggatgagagtgggaagcactggtcgaagagtgtgatggacaaacagtacgagattctgtgtgtcagccagtttaccctccagtgtgtcctgaagggaaacaagcctgatttccacctagcaatgcccacggagcaggcagagggcttctacaacagcttcctggagcagctgcgtaaaacatacaggccggagcttatcaaagatggcaagtttggggcctacatgcaggtgcacattcagaatgatgggcctgtgaccatagagctgga

SEQ ID NO: 789 - DNA, 406 bp, Homo sapiens
ctaggacgtcgctgctcttcagcacgaagaagaggaatttcttgttgaagtcgcagagcttccagaagagaactagcagctcctggtggaactggatcttcttggtggagttaggcaggtaggtctggagcagggggttggacagcagccgggctatacccttgaggatgaactggaagtcctcctcacgatggatgcgggacaggtagttcacaaacaggttctcagggcctggaggatcagcatcatccatggcggtgccagtggtggtgccgtccacagtggggctggcactgctggcactgtcgtggtccaaagtgacaatgagcacctgggcagcctcctccaccaggggttcccggtagtcagagaagagcaggtggttgtaggggatcccgtagcccat

SEQ ID NO: 790 - DNA, 409 bp, Homo sapiens
attcgaattccgttgctgtcgggaggccgggggagacttggccggcgcgggacgagcgtgttggcgcagcagagcgtccgcacacagcacttgcgggacctacaggtcatcgccgcctaccgggaacgcacgaaggccgagagcatcgccagcctgctgagcctggccatcaccacggagcacacgctccacgccacgctgggggtcgccgagttctttgagtttgtgcttaagaacccccacaacacacagcacacggtgactgtggagatcgacaaccccgagctcagcgtcatcgtggacagtcaggagtggagggacttcaagggtgctgctggcctgcacacaccggtggaggaggacatgttccacctgcgtggcagcctggccccccagctctacctgcgcc

SEQ ID NO: 791 - DNA, 412 bp, Homo sapiens
ggcacgagcctgggcatttataccttcacgaagcgggtagccttggaggagatggagaataagccccggaaacagcagggctacagcaccgtgtcccacttcaacattgtgcactacgactgccatctggctgccgtcaggttggctcgaggccgggaagagtgggagagtgccgccctgcacaatgccaacaccaagtgcaacgggctccttccggtctggggacctcatgtccctgaatcagcttttgccacttgcttggcaagacacaacacttacctccaggaatgtacaggccaacgggagcccacgtatcagctcaacatccatgacatcaaactgctcttcctgcgcttcgccatggagcagtcgctcatcgcatacactggcggtggcggccgggagagcaaca

SEQ ID NO: 792 - DNA, 369 bp, Homo sapiens
tgagcaaggatggggctggggcgagagggagaacaggacggagctggcctccagctcctcatggtgcagatctgcgaggcacacatgacccgcagtgtccccaggtgacgcctcattaggaagtgggagatacatacaggttagcaaacctcggcctgcaggtcatgtccttttccgtgtgtcctgtgagtgaagaatggttttacattattttttattttagttttttgagacaaggtctcactccatcgcccaggctggggtgcagtggcatgatctcggctcactagagtctctgcctcctggtcccaagtgatcctcccgccttagcctccctagtagctggcactacaggtgcgtgccaccatg

SEQ ID NO: 793 - DNA, 404 bp, Homo sapiens
cgttgctgtcggtgcagtggcgggatctcggctcactgcaagctctgcctccccctgggttcacgccattctcctgcctcagcctcccaagtagctgggactacaggcgcccgccactacgcccggctaattttttgtatttttagtagagacggggtttcaccgttttagccgggatggtctcgatctcctgacctcgtgatccgcccgcctcggcctcccaaagtgctgggattacaggcgtattcatgaacttttacatgaatgagtaaggacattgaaagatgcatgagatgatgcatacatctttgtggttgacttatcattgcatgatgcatgacgtacatgttcagagtaatattcttctgcattatagtgagagaaaaatcttggattttagtaat

SEQ ID NO: 794 - DNA, 401 bp, Homo sapiens
tcgaattccgttgctgtcgagcacacttgcacctatttgacttaggtcctttcacaaaactgttcctgtgaaagcatttcctgcttttcttcagacggtttctctagaggactttctaaagaaaattcagcgagtggattttgatatattccacccatctttacagcagaagaatacattacttccattatatttggatattcagtcatggagaaaaacatattaaaataatttcatggccctgatgttaattctagtctattagttttataaaagctaggattcttatttaggaacaccagaaatgactggtacgaaaaaatgaatttattgatgggaaggcacgagctcacaaattgataacttgcgcggactaggtgccaaacggtgaaatctggcca

SEQ ID NO: 795 - DNA, 402 bp, Homo sapiens
cgttgctgtcgcagaagatcatgtgagcccaggagttacagactgcagtgagctatgattgcactgatgcactccagcatgggcaagagcaagaccttgtttctaaaaaataggtagtggtatattcatattctggaatagtgtaaaaaatgaaaaactgaagataaatatatgaagacaagtcctcaaaatacttctgaatgaaaaaaattgcaaacatgaatctcaaaaacatgctgagtgggccgggcatggtagctcatgccggtaatcccagcacttagggaggccgagttgggcagataacacttgaggtcaggagttcgagaccagaccagccaacatggtgaaacccaatctctactaaaaatacaagaaaaaaatcctaactactcgggacgg

SEQ ID NO: 796 - DNA, 372 bp, Homo sapiens
ttcaccatgttgaccaggctggtctcaaactcctgacctcaggtgatccacccttctcggccttccagagtgctgggattacaggagtgagccaatatgcccatcttgtcttttctttataaaccacccagcctcaggtatttctttatagcaacgcaagaacagactaacacacttcccttccaggatctttcagagcacgtcaagcccctgttatagattcttgagctcccacatttctccttcaaagtaattattccaatcacactaaataaataataactgtgaattatttgcttgaagtctgtttccgatggactaggatgtgagctccatgaagaccagatcagagggccaggcgcggtggctcac

SEQ ID NO: 797 - DNA, 372 bp, Homo sapiens
cccccacagaggctggagagggcagacgggcctagatgagcctagacgctgggtcccaccagtcccccaaagccagatgttcctgttctcacctgggtgtgtgagattttttgtttcattatgctccttacaaggcgaagctgtgtgaaccgtgagcgtgagctctgggccaggctccatggcccttctaaggaaaaggccccttaggacacctctgggctgtgaggcttccccggcttcccctctgggcttggaggaagtagggtaggtcctcagccactctgctgaggggcaaaggaaccagggtatgaacaggaaaacagaggcccaaagagtggctgcagattcaggtgattcctggggcttggggga

SEQ ID NO: 798 - DNA, 350 bp, Homo sapiens
agggttacaggtacctgccaccacacccagctaatttttgtattttagtagagacggggtttcaccatgttggccaggctggtcttgaactcctgacctcaggtgatctgcccgcctcggcctcccaaagtgctggggttacaggtgttagcccaccgtgcccggcctcttttttttttcgtacaatggcccattctgttgccccggacgacattcgatgcccctgtttacagttctttgcctccactttctgctagtgttttgtttttgtcagcctcccccctgcccgagagaatataatatagtttgttccgcacccgcgaaaccataactcccttttatttggttgc

SEQ ID NO: 799 - DNA, 402 bp, Homo sapiens
  misc_feature (1)...(402): n = A,T,C or G
ggcacgagccctgggccacatttgaagaagaattttcttgggccacataaaatacactaacgatagctgatgagctaaaaaaaaaaaaaagccggggaataattttggggatatctgcccccacaaataaacaaaaaagcccttgctttcaaagggtggaaaattgctgctttgagggctgggaacctggggggaacctactactccctgggccttagtctcccaaatccaccatgcttttgcccctttgagggggtcttcactttgtctctggcatctaacatggggcctggggcatagggagcatgcaataaatatttggcaggggaggggatggataaatggataggggaatgtagggggacaggggactggggggatgttgnggcctctgaaaaaccc

SEQ ID NO: 800 - DNA, 236 bp, Homo sapiens
aaaaaacaataaaataaaaattataaagggggggcgtttttttcgtgataccaaaacgggaaaaaaccttttgggggttgggcgaccccccctctttaggggcggggaaaaaagggtttttttttgtgaattttgagcctcttcttcttttttgtgcccccttacgtggtggcgataaggatctgtgtctccacccgggcgtgcttcttttattgcgttgctctttgcgtgtgcct

SEQ ID NO: 801 - DNA, 131 bp, Homo sapiens
gtccgacccgggcaagatggcatcggcgctgcgcgtgcgttgttgagtgttcgggacgccggcctgcaggcgccatggtcttcctcaccgcgcagctctggctgcggaatcgcgttaccgaccgctacttt

SEQ ID NO: 802 - DNA, 398 bp, Homo sapiens
cgttgctgtcgtgaatttgtagctccatttacatggatccattgccccagctactggagtatagcctacaatgtttatttcagtcaatattcctttatctgggtgttctgtacaatgtttattacaggcaatattccttcatctggatgttctgtgaagatagccatgtttatgggggtcttagttttcaaactctggcaactctgtgaaaaataggagcaaactagagagccctggagattggtagtagggaagggaggatagcaggaagtttgaaaaattatcagccccggggcctaaaggaatcagctgtcatcattttcatcattattattttggttaggatggcttgaaaatcacaacgtatcttggtttacgtaattgaagtcttacagaag

SEQ ID NO: 803 - DNA, 370 bp, Homo sapiens
tatagaaatgctactggctgttcctgagttttagttttaaattactgtcaatcattcctcagtggtcccatgcacagtccccatgctgcagggaggccagctcctctgggcctcgtggagtaacggtgttgcttagcccatatcctcctggacaagtgctttggttcttccctttaccggtaaagtgttgcaaacgtagtctatcgagtttgttctatttcatctgttctgtttacgaaactgtaacttcatataggactgccttagggctgaagtaaataaactgtcaacctaactaaaacataaaacaggccgggcgcgggggctcacgcctgtaatcccaccctttgggaggacgaggcggtccaac

SEQ ID NO: 804 - DNA, 374 bp, Homo sapiens
atgaaactctggatgaataagagaacagaaaatgcctgataaattcagattttcaaaggacatgtacagctttttagtcaaagaggcacagtttattcaagtaaataaaacttatattctcaggataactaagatttatttagttagactgagcattccaaattatttattccacttatgttaattcacacagggaagactgaggctcaggggtgctagatgactggttaagctttctcagtgacacagccatgacgacagccaagtttttctaatttttggtccaggcctctctctaacacatcagtgacttctaaacaatcatttgagaattccgaggtgatccttggtgcaccccattcctcaccatccaa

SEQ ID NO: 805 - DNA, 370 bp, Homo sapiens
  misc_feature (1)...(370): n = A,T,C or G
tgaccttttgatcccatcatgggactgttccccagccctaggccactggaatggggggaaatagaaccctcctttccttgttcccactcttgtttcttttgaacatgggttacctcccttcgcgtcttttggaacagaaggggatcataagctcttgagtctctgttttctgctgtcatctactcttcctgcctctggcacctcccagctcctgacttcctcctgcttccccctggagccagagacgtggctgggaagagcccctggcctttgaagccagtggtggtggtgaccaggggcaacaggccactgtgctcctggatgcgtggtctgccaggtctctctcccatcgccctttgggcctncgggn

SEQ ID NO: 806 - DNA, 373 bp, Homo sapiens
aagaagctagtaatagtctagcttccactgctatctgcccgagcttcagcgattccaccccctcaggggccacacctccctgcaggtcccatttctgggaaaagccggcaatctatgtcttttggaaatactccctgagctcccaaaatgggtttggaaagagctatacatagctttctatacattggtctctatcatcttataggataataaaggagataattcatgcacacaaataactatatgtaatgttacatttagggaaatacaataatttcactgtccttgccttaggatttccatttaagtaggcagagatccctggggacaggaataatctgggttcacaaaagggtgacacctggccgggggg

SEQ ID NO: 807 - DNA, 374 bp, Homo sapiens
tgcaatgttttgtagggccagaattatttcacacacataagtatgattttccccaaccagaccacaagctcttcaaggttaacaacaccctcgcccaaccccctccccctcaaacaattcttctgctctcctagagcagactttgatctaaattggatctaaattgactcgaaatgtcaggaaaaagagattaatgcacaaggtccctttctctgagagaaggtgtgatagagcagagcttaagcctgggtgggaaatgaaactgcccaccactctctccaccccgccttggtcttccgagggtgacaggtgggacgctgaagagagctgccctcctggtcccggcctccatgtgaacagcctcctcccaaatc

SEQ ID NO: 808 - DNA, 370 bp, Homo sapiens
ctggggccactgcaaacagcaaaatcaccaaaaagagcacaaaaacgcaaaccccgaggctctcgctagacagtaatgagggcgtggtccacctaggaggggaaacggggaggcggagcgtggcctgggctcagggaacgcacgtccatgactctaatttcttgtctctctctgcgtgtccaaggataagagggaaagtaccccaggcattgatttggggttcacaaatacacacctagccggcgaattcgcaaatacggactccgtgaatgacaaaggggactacagtacaaacccagcctgtccctcgcgcccctagtgtgctgagggcctggccgtggcaggaaggaaaaggaccgctcagacccct

SEQ ID NO: 809 - DNA, 396 bp, Homo sapiens
cgttgctgtcggggagatggagctgttttactcagtgtgtgagtgtgtgtgcgcgtgcatgtgtgtgtgtgtgtgtgtgtgtgtgtgtgtgtctgtctgtctgtctctctcctcctggacccagggcacccaagggcagggataggcgcagtggtcatatgaagcagcgccagagaggggacctcccagctcttatttgcaccctccccacctcaccaactttggtccctctctgggggcatgaatggttaacacacaccagagcagtactccaatattggagagtctctgggggcacagggctttgaatcaggggagtatcctgccttccctcccctgaccccacatggtctcagggcccccttagggccccctacccactgatagctttctcct

SEQ ID NO: 810 - DNA, 404 bp, Homo sapiens
  misc_feature (1)...(404): n = A,T,C or G
cgttgctgtcgctccattttcgtctagcagtggaagaagactgaatatctcgtataccagaaacatgactcttaaagatggtaaaaacaatgtagccatagctgtaacgtataaccatgatgggtcttatagcatgcagattgaagataaaactttccaagtccttggtaatctttacagcgagggagactgcacttacctgaaatgttctgttaatggagttgctagtaaagcgaagctgattatcctggaaaacactatttacctattttccaaggaaggaagtattgagattgacattccagtccccaaatacttatcttctgtgagctcacaagaaactcagggcggccccttagctcctatgactggaaccattgaaaaggtgtttgtcanagctggag

SEQ ID NO: 811 - DNA, 401 bp, Homo sapiens
cgttgctgtcggaccgacactttcactcttcaggcacatgatcaattctctccattttcgtctagcagtggaagaagactgaatatctcgtataccagaaacatgactcttaaagatggtaaaaacaatgtagccatagctgtaacgtataaccatgatgggtcttatagcatgcagattgaagataaaactttccaagtccttggtaatctttacagcgagggagactgcacttacctgaaatgttctgttaatggagttgctagtaaagcgaagctgattatcctggaaaacactatttacctattttccaaggaaggaagtattgagattgacattccagtccccaaatacttatcttctgtgagctcacaagaaactcagggcggccccttagctcc

SEQ ID NO: 812 - DNA, 372 bp, Homo sapiens
cagaaagcttcattaaaaccagtaaagacatcaagacaatgtaactactgattattacatgaagctaatctgaagtacaatcttagatacaaaataagacatagaagtaatgagtgcagaaggagtaaacagtgaacgtaggtgggggttgctaggtaacaaatatcaatactgactaatactggcatggtttatgtgtagttaaaaattttaagttaactatgttcataatcacccaaaccactggaaggggggaaaaaggaaaattagaaaacttcatctattcaacggacatggaaaatggaattttaaaaaatttcaaaattctggttaatgcaaactaggatgctaaatagaagcccccaattatct

SEQ ID NO: 813 - DNA, 367 bp, Homo sapiens
agttcccaaacctaggcctcagtcctatccttcaaaaaaacaagccgaactttgttttctgtttgccaaggaaagggattagtgtgtctgcaccaagaaaagtaattcttttccatacaaaaaaggataggtactatattccaatcaaggtaacaaaccagtgggctaaaaaagaattgccttttaattgtgaaaacatttcctgatcttttaaaaaaagaaatctacgggaagtataaaggcaatcaggtaataaactcattgaaaatcagttatagtattagcaaaagtttacagtggttggctttgtcacatagtcatagtttgtgggagaatcttgaccttatttgatgctgtaaatacttgg

SEQ ID NO: 814 - DNA, 404 bp, Homo sapiens
cgttgctgtcggggatgtggcgcctttttccgctcgccctcgcgccccccccgccccgcgcagctaaattccggcggaggggcgagctggcaggccggctcctcccactctgggcagcggggtcccgcgtcccctcccccactatttggcagcgtctgggggtctggggcagcttcgttcattcacccgggggagttgggtttccgggaagggtcggaagctcctccctcgcttcctggtgggtaatggggtggtgcctttgactccgggggtggaaaagcgaccccacattcaaggacgccaatggcatgttgagctttcccaatctaaaccaggtgcgtggagggaagcaagtgcttactcccagcttgaaccctgagcagcgggtctctaactttagagcg

SEQ ID NO: 815 - DNA, 396 bp, Homo sapiens
  misc_feature (1)...(396): n = A,T,C or G
cgttgctgtcgccgggatgggatgtggcgcctttttccgctcgccctcgcgccccccccgccccgcgcagctaaattccggcggaggggcgagctggcaggccggctcctcccactctgggcagcggggtcccgcgtcccctcccccactatttggcagcgtctgggggtctggggcagcttcgttcattcacccgggggagttgggtttccgggaagggtcggaagctcctccctcgcttcctggtgggtaatggggtggngcctttgactccgggggtggaaaagcgaccccacattcaaggacgccaatggcatgttgagctttcccaatctaaaccaggtgcgtggagggaagcaagtgcttactcccagcttgaaccctgagcagcggttg

SEQ ID NO: 816 - DNA, 399 bp, Homo sapiens
gagcatattatcaaggtcaaaggcagcgtgataagtacctgacaattctgaaagctgttaaagtgcttcaggccagttttagaggagtaagagttagacggactcttataaagaagcagactgcagcgacactcatttagtcaaactacagaagatacagacagcaaacatactttaataagttaaagaaaataacaaaaacagtacagcacagatactgggcaatgaaagaaagaaacatacaatttcaaaggtataacaaactgaggcattctgtaatatacattcaggctatttttaggggagagaaagctagaagacatttaaaaatgatgcatatagccgcaactctcattcagaggagatttagaactctaatgatgagaagaagattcctcg

SEQ ID NO: 817 - DNA, 400 bp, Homo sapiens
ggcacgagggaccgggccgagccgggccgcccgggcgcagtctttaaccatggcgtccctcttcaagaagaaaaccgtggatgatgtaataaaggaacagaatcgagagttacgaggtacacagagggctataatcagagatcgagcagctttagagaaacaagaaaaacagctggaattagaaattaagaaaatggccaagattggtaataaggaagcttgcaaagttttagccaaacaacttgtgcatctacggaaacagaagacgagaacttttgctgtaagttcaaaagttacttctatgtctacacaaacaaaagtgatgaattcccaaatgaagatggctggagcaatgtctaccacagcaaaaacaatgcaggcagttaacaagaagatggat

SEQ ID NO: 818 - DNA, 404 bp, Homo sapiens
ggcacgaggttcgatgtgacggagcgctttgtcctccacagacaccagacaggccggacctgccacaagtgtgggacccagctgcgggacaccattgtgcactttggggagagggggacgttggggcagcctctgaactgggaagcggcgaccgaggctgccagcagagcagacaccatcctgtgtctagggtccagcctgaaggttctaaagaagtacccacgcctctggtgcatgaccaagccccctagccggcggccgaagctttacatcgcgaacctgcagtggaccccgaaggatgactgggctgccctgaagctacatgggaagtgtgatgacggcatgcggctcctcatggccgagctgggcttggagatccccgcctatagcagggggcaggatcc

SEQ ID NO: 819 - DNA, 400 bp, Homo sapiens
ggcacgaggcctatcatacactatccaaatgaagtcattgtcaaagttcacgctgccagtgtaaatcctatagacgttaatatgagaagtggttatggagctacagctttaaatatgaagcgtgatcctttacacgtgaaaatcaaaggagaagaatttcctctgactctgggtcgggatgtctctggcgtggtgatggaatgtgggcttgatgtgaaatacttcaagcctggagatgaggtctgggctgcagttcctccttggaaacaaggcactctttcagagtttgttgtagtcagtgggaatgaggtctctcacaaacccaaatcactcactcatactcaagctgcctctttgccatatgtggctctcacagcctggtctgctataaacaaagttg

SEQ ID NO: 820 - DNA, 398 bp, Homo sapiens
ggcacgaggcatggctttccctgagccttagccgcggcctccagagctgccgcagaaacggttgaagacgctggactgcgggcagggggcagtgcgagccgtacgatttaatgtggatggcaattactgcctgacgtgcggcagtgacaagacgctgaagctgtggaacccgcttcgggggacgctgctgcggacgtacagcggccacggctacgaggtgctggatgcggccggctcctttgacaacagtagtctctgctccggcggcggggacaaggcggtggttctgtgggatgtggcatcagggcaggtcgtgcgcaaattccggggccacgcagggaaggtgaacacggtgcagtttaatgaagaggccacaggtatcctgtccggctctattg

SEQ ID NO: 821 - DNA, 403 bp, Homo sapiens
ggcacgaggagccatgcgagcagctcgttcccttggagaaagaactgtgacagaactgatattacagcaccagaaccctcagcagttgtctgccaatctatgggccgctgtcagggctcgaggatgccagtttttagggccagctatgcaagaagaggccttgaagctggtgttactggcattagaagatggttctgccctctcaaggaaagttctggtactttttgttgtgcagagactagaaccaagatttcctcaggcatcaaaaacaagtattggtcatgtggtgcaactactgtatcgagcttcttgttttaaggttaccaaaagagatgaagactcttccctaatgcagctgaaggaggaatttcggagttatgaagcattacgcagagaacatgaa

SEQ ID NO: 822 - DNA, 396 bp, Homo sapiens
cgttgctgtcggcggtgggagcgatgagggtctgagacggtgggagcggttgtgtgaagatggagtttcccggaggaaatgacaattacctgacgatcacagggccttcgcaccccttcctgtcaggggccgagacattccatacaccaagcttgggtgatgaggaatttgaaatcccacctatctccttggattctgatccctcattggctgtctcagatgtggttggccactttgatgacctggcagacccttcctcttcacaggatggcagtttttcagcccagtatggggtccagacattggacatgcctgtgggcatgacccatggcttgatggagcagggcggggggctcctgagtgggggcttgaccatggacttggaccactctatag

SEQ ID NO: 823 - DNA, 403 bp, Homo sapiens
cgttgctgtcgcgagaaggaaccgcccaagccatatcaagtcgagtcccggccgctcaccatgttccgggacattggccagcaactgcaggccacctgtacctccctggggtccagcattcaaggcctccccaccaatgtgaaggaccaggtgcatcatgcccgccgccaggtggaggacctccaggccacgttttccagcattcactccttccaagacctgtccagcagcatgctggcccatagccgtgagcgtgtcgccagcgcccgcgaggccctggaccacatggtggaatatgtggcccagaacacacctgtcacgtggctcgtgggaccctttgcccctggaatcactgagaaagccccggaggagaagaagtagggggagaggagaggactcagcg

SEQ ID NO: 824 - DNA, 393 bp, Homo sapiens
cgttgctggcggtaaaatatcattttatctcatactgttagtaggagcttcttaactactacccattcttaactttaagaagcatagaatttaaaatatagaacgaccgcttgtatggcctggatctgggcacttaaccttactaagtttatctcgtgtaaactgaccttgctaactcacgtgaggcttaaataatacaatgtggaagacttcagggcacatttttggttttttggtttttgtttgtttcttgagacggtgtctcactctgtcgcccaggctggagtccagatgcacaatctcggctcactgcagcctcctcatcctgggttcaagcagttctgccttagcctccggagcagctggaattaggtcgcccaccaccacgcccgg

SEQ ID NO: 825 - DNA, 229 bp, Homo sapiens
atgtcctctccacatgaagaatcaatctgaattcttcaccactgatgttttccatctctaacttgaagttacaaactaactttagcaggaatacttatggcttacttcggagcatctgttacaaggcaagaactatcatgtatgtttgctacattcatatttaatttctatttttcttcgagctggccactcgatttgctgttcagggtatgttccctctttcttgtct

SEQ ID NO: 826 - DNA, 368 bp, Homo sapiens
aatataagtgacaagtacacacacacacacacacacacacacacacacacacacacacacaaaacacagaaattactgcatcatgagggtggaaaatcaattttgtccatagaggtcatcacaaatattcataatttttatagggcttaacagtgagtcctaacgtcaaatattcctgaatgctaatcctaaaactctctaatttatagacttttcttactcttaaccaatcagcgcgccatcatatctacatgatttttacaaagtgtttttaactaattctattcccaaaaagtatctgtgtacctgttgttctgggaagcatcaggagaggaagaaattaagggctatgccactgataacagttt

SEQ ID NO: 827 - DNA, 225 bp, Homo sapiens
atgtacacataactgtcattgtttgcagacaacaggctaattcagtagaaaatccatgcaaattaactaaaaaccctttaggacaatagaattaataaagtggaagattaaaagattaacaaagaaaaataattgcttccctgtactgggaataactaattagtaaatgtaatagacaaagatcttatgctatcactttttcaatgttatttattttgtacctct

SEQ ID NO: 828 - DNA, 362 bp, Homo sapiens
tgtagtggtttagagtatacactgaattaatgagctattgggccacggggagctgaaagcttatatatgtgtggagacactgttctgctttcaatctcatcatccttatctccaacatatgtatgtatattgaaataccaaccaagtagtgtattttgctagagcttatggttctcataattaatgataagactgtcagccgggcgtggtggctcacacctgtaatcccagcactttttgagtccgaggcaggcggatcccttgaggtcaggagttcaagaccagcctggccaacgtagtgaaaccccacatctactaaaaatacaaaaattagctgggtgtggtggcacacgcctgtaatc

SEQ ID NO: 829 - DNA, 364 bp, Homo sapiens
atatgactataaaatctatcttcatctgtagggaaggtaatgaattaccataaatgccttcataatccagtctctctccctcccctcttttctaataaaaatgcagagagaacactgtgaagctcaagctgcctctaaagaaagtagagatttacagaacataacctcacaagatttgttgatgaattatgaaggaaggacatttattttgagaatcatgagcattataatatttattgaggattagaaatttgttatgaggaggtgcttctacctcctcatgagccacttatgcacttaatgcccactggaagaacatgattaattcggcaaaatccaactctcatgaatatccccctgttgt

SEQ ID NO: 830 - DNA, 362 bp, Homo sapiens
  misc_feature (1)...(362): n = A,T,C or G
cttcctcagttcgggaggtttaatgatagatggagaattctgaaagttaggagctacaactatttgaaataaaactctagttacatagttgaaccgttcaaggtaggttgtttaaaagcagtttgttcacaaacaggtatatacacagtagagaaaatttgttattttagcaaacgcttatttagctcatgctgatttaatgagggttgctttcatgatacttaatagttataagaacattttttacgattctatagttaaacatttgttttgcataccttgttaaactccgtctctccgtatagcatatactacttgtttgacaggagattcacaaatgcatccaatccaaagaacagaan

SEQ ID NO: 831 - DNA, 362 bp, Homo sapiens
  misc_feature (1)...(362): n = A,T,C or G
taactacattttacagaagatgaaaccagagctcaaggtcatgttttagtaaagtgaaggttgtggaattcagaaccagatttatctgactccaaggtccaagctttttaccctctaccatccacccagatgtatttcctgactcattcaggagtttaactttaattgtgatagtaatattctcccatcagctaagtgaaccagcttggaaataagtgtattaatgaatttcttcactaaaatttaaaaatgcctttgtatttatgcatagctaactcctgagtttccattattgataataattaagaaactggtngtatatgaaaatggtgttgtagcatacatttggcttcattatcttc

SEQ ID NO: 832 - DNA, 362 bp, Homo sapiens
ctatcttagaacaagttagatagtatatgtacttgtaataacttgtgactagatatgttagttttgtctattaatttttctgttaaaaagaatatgcattgaaatgagatggaaaacaaaatgaaaagtgtttaaaaaattaaatattttagaaggatcaatatcctaagggttgtgggtaattttttcctactttctaaaacttcagattcctttcactcacttaaggttgtactaccattaatgcaatgttttctgggagtgcaagatttgcaaatgaattaataacagctagaagcctcactatttgcacttttataacattctttgctgttatcattacaaggtaaaattatatagta

SEQ ID NO: 833 - DNA, 394 bp, Homo sapiens
cgttgctgtcgaaaaaaaccccacaaaaccttgtgggtgtctgagacaagaacatttcaggcaggaataacagtaagtccgaaggccccaaggtaggaactgcatgcatgatgccgtggagaacagtcaagaggtcattatagctggagtaaagtgagtgaaagagaatggtaagaaataaggttggagagaccgggtgcggtgggctcatgcctgtagtcccagcactttgggaggccgagatggatggatcacctgaggtcaggagttcaggaccagcctggccaacatggtgaaaccctgtctctgcaaagaatacggaaattagccaggtgtggtggcaggtgcctgtggtcccagctgcttgggaggctgaggcaggagagccgcttgg

SEQ ID NO: 834 - DNA, 367 bp, Homo sapiens
cggaggctacggagcagccgggattcagaatactactacagagccagtctgagaggacactgctgcctccacctccgaacatgtatctggatgctccagcttgctctactgtcatctgggacactgaacactaggcaccggtgccacagtgctaccacatctgcccctgtgcacttcatactggtggtgcagctgtcttaactgcttctgctgaccaacaaaatgcattctccgtggctcctgcttcttcactgtgagaggtctcattgtctaacatccttgggaggatggactttaaattcatcccctaccaatgtactctatcctaactgtatgggaggcggtgaaatacctaatcgcattttct

SEQ ID NO: 835 - DNA, 371 bp, Homo sapiens
  misc_feature (1)...(371): n = A,T,C or G
acagaaggggggcctctgccacactggatctcctcctcattctcgatcctgcccaaatgccatttctcagagagtggactctggtcccgggctgccttgattcaacagctgggcatgttacttacttttcctgtgtccctgtttcacctgtaaaatgtccgtaataacggtgcctacctcttatggttggcacaaggcttatgtaaaacaatcgacacagtgactggcacagtgtgcaaaggccatatatgattattacttaacgtgtccaattttcattttgtgtctatccctcagccctatctgacataatttagtcccgctttttgtgggactcctcaaccccccaaggctaggtatggccaggtacn

SEQ ID NO: 836 - DNA, 392 bp, Homo sapiens
  misc_feature (1)...(392): n = A,T,C or G
cgttgctgtcgggcaaggaaccactctaagctcttcagtcactctaatccagaaactgtgtctttatggctcaggcaaccagttcatggcagcctagaatgacagggaaaaagctgggaagggaccttagaaaatcactcttgcccaatactccagccaaagtggtcttttaaaaaccaagttcaggctgggcgcggtggctcatgcctgtaatctcagcactttgggaggccgaggtgggtggatcatcaggtcgggagttcaagaccagcctggctaaggtggtggaaaccccgtctctgctaaaaatacaaaaattagccgggtgtggtgcacgcctgtaatcccagctactcangaggctgaggcagaagaatcgcttgaacctgggn

SEQ ID NO: 837 - DNA, 307 bp, Homo sapiens
cacctgtaataattgtgtggctattccgaatatgcaaagttgaataaaaatgcaaaactctacatgaatactcaattggattattctccagctggttgagaatacttacgtagtacttgcaggtattaattgatttaattcttataacacattttttaaagggtacaaacaggcattggaaaaaattttaaatacagatttaatacctgactcggaagaaaggtataataaggatggaggatatttgccttcccgacattttggagctcaatttttttttcttagcaaaagaaatgggtggacttcg

SEQ ID NO: 838 - DNA, 361 bp, Homo sapiens
aaaagtaagatggagcacttgtcttcatggaagtaaattcatgataatcttgtttaagtatcctattcagtaattatgtattgttaggtagacattatttcacaggactattagagcatattgaacttagaaactttgaaagctctttggatgctagctggtacagaatgcccatctgctctatgattactgtgagaattgtgttaaaactcctggcttcttgttaatttccaagtatagtgcaatatgtggatttcaatatataaagatgaagaacctagatgttttgagcttttcatgtcagaggtagtctcagagttgactcatagttggccaggtcatcttcagctctcttgcttag

SEQ ID NO: 839 - DNA, 392 bp, Homo sapiens
cgttgctgtcgtttgcatttaaacaagttggagttcgtaagggtgaattacttgaaatgtactaatagatagtagagaatatttacaacacatttttaaaaatatgacccataataataggtggcatttaagaaatataagcatggtatctatcttacatgcatattaggagtggacagttttctatgattagaagcacacagttgtcgagcaagggttctaatttttgtacgtgttgtgggaaagaaagataatacagggtgtcattgcaaagatatttaactactctagataatttaggcctacactactctaataaattgggttttccaaattattgatacaccttgagaactagtgcctgggtaggcctggagaaatgactccaggag

SEQ ID NO: 840 - DNA, 391 bp, Homo sapiens
ggcacgaggcagcagctggggaggagccaaagcctcggcgctcacctaagccgcagggagatacacccaactgggagatgaggaaacagcaacccagagaggagaactaacccacacaggatcatttcgcgaaggagcaaggctgaagaaccagacctggactttcttaggcaagtaaattctgattatatcacggagacttgctttgagaaatctgccccttttcactgtgagatggcgtcattaacacatctagttctctcctaagcagccagcaaacatttattatacactagatattatattggcatttgagatgatacaaaggaataaaatggggcaattagctctagtaatttggaggtctcaacttacggatattccaagttcc

SEQ ID NO: 841 - DNA, 389 bp, Homo sapiens
  misc_feature (1)...(389): n = A,T,C or G
cgttgctgtcgcttcagagatgttctgtccaagggctagtttgcacggaggagagcaggaatgcagggccagggcacggccacccagagcctcatgctgttcaaagcggctgagtgagtgctttagaccacacaaggcaggtcgagaggcacagtgcatgcttgggaggatggcacggggcagtgggtgaggatggcccaggtggctggggtcaagtgtccctaccagcccagcctctcccatatcatcatgggacatgaatgtgagggtgtggtgatggtggcagtgtgaggtttaagaaatacatctagaaggccaggtgtggtggctcacgcctgcaatcccagcactctgggaggctgaggtgagtggatcacgaggtcaggagn

SEQ ID NO: 842 - DNA, 227 bp, Homo sapiens
gagcacctctgtgttcctaggtctgtgcagtgacttgggagtacagtgatgaatgggaccatatggtcccaccctcatgggcagtctctaattcctgccttatgaactgaagatctatttcttggcctgactttatattcttcatggttaaaagttttggggcctctgaagtgtgcatttgaactcaggcatggccttctggggctgtttatgccctatcaccctga

SEQ ID NO: 843 - DNA, 361 bp, Homo sapiens
  misc_feature (1)...(361): n = A,T,C or G
aaattagataataaagtgcttttagtaacatgcctggcacagttcattgattcaaacattgaaaaaaaatttttttaattatcatagtagtgtgtacctttggaaaaattataacttaacagataaggctaagtttgagccttccagacctttccttctctgcatactcttcaggggtaactgggatcatgttctgggagcatgtcattccaagactgtttctttgcttttataaacacatctgtttccatagaaatgctgtagtggttgcagagggggcggtgcgtggtatcatcctggatttgntattctgcgcttttttgcttgacctaccttggatggctctctagtcgatacagct

SEQ ID NO: 844 - DNA, 363 bp, Homo sapiens
cggggttcaagctggactcgccacgactagattgcaggggactaaccgcttaaattgcgcaactggtgatgctcttgctgtatttggagacatgataaacgagtatatgctgcatagacccgacaactgcattcattgtatgtgtcaggttcaccgggaggtgacagatgctacacttgcatttattgaatgagcttattggatatcttgggtgcaagcaggaagcaacctgctgacctgagctccctgtggccctggtcctctccactctgaaaacatccaggcagatcttacaactcctccagtcacacccagataccaactctaggccagaccaatgcaatctcttggcttgaattcaac

SEQ ID NO: 845 - DNA, 388 bp, Homo sapiens
ggcacgagattccttgcctgattttattgtacagtgtgcacaagcacaatggtatgcttgtatatagaaactaaaaatactatgaagtacataagttccctatggcttatggagagttatttattaattaactttatggtagggctagtatgaatacctttttaacaattgtgtgctattacaacaatgaagattcaaatgactccgctttgaaggatgttttctctatatggtaaaatatatatgaagaagtcttgattacgtgaagatcacttgactcagaatacttcaatgtattttgttcacattaccactaagcatattatcagtaaactattaactgactgcacattatgtaatacgttgtactttttgttgaattcaccga

SEQ ID NO: 846 - DNA, 365 bp, Homo sapiens
cttgggaggctgaggcatgagaattgcttgaacccaggagacagaggttgcagtgagccatgatcccaccaccacactccagcctgggtgacagattgagactctgtctcaaaagagttattaccacaacaatagactataaaatctgtagtcttaatttgcatatcatggtagacaggaaaatacctttagcatcttaataaaagatgaatcaaactctctaataaataccctagaaaagacaaacaatacactaaatataagattaaagagtagtttctaatacatcattctaagacaaaatgagggaaaaaaccccatttcaaatttaagtcaaaagaaagggtgaaacataaaggagtctg

SEQ ID NO: 847 - DNA, 391 bp, Homo sapiens
tctacccaagtgaattataattaactgcgtcacatttatcattatactgacctttgagcatttcccccaactcacagtattttgtttctcagatatgggatattcgcttgctttgtgaaaaacatgaaaatgttagcagagctcagtgctttgcccagcagatggcatttgtgtgagtttttcaggatcctttggaatctgtcacttgccaattacccaatttgttttgaatactctgtatttccagttaatattgcaccatttacataaagagaatgtgccaaaattgctgtaatctgttctgtaatcaaatctgactgctgtagatgtataacttacttttggtaagctggttactgcaaaatggtctcaagacaatccttttctattc

SEQ ID NO: 848 - DNA, 389 bp, Homo sapiens
  misc_feature (1)...(389): n = A,T,C or G
cgttgctgtcgntattttatgccttcaggttttaaaaattataaacatttacattacagtaaaagtcactctggtatacagatctataaagctctgataaatgtgtagagttgtgtaaccaccaatgcaaccaaggtacagaacagtcctcttagcctctccctaccaaatttattcctgctactttgtagacaaaaccagtcccctacacccaaaccctggcagacactggnttttttcttcggtctctattttttttttttaggaaaaaaagattatttttttccccacgctggaagggggccaggggggggatttggaaaaagggcaccctccccctcaggggattaggggtttttctggcttggctccccaagggggtgggaaan

SEQ ID NO: 849 - DNA, 395 bp, Homo sapiens
  misc_feature (1)...(395): n = A,T,C or G
cgttgctgtcgcttacagggtcattcagaccccatcttagccctagatcggtgcttgctctactcacctgcactgtcctggggacctgggctctggcctgtcaccttgagctccaagaatgtgacctgtacccattcaggccccttaactctgacagatgagggtttcttactcctccatgcagggctgggccagctgttggtctcagtcgatcattcaggaagtcattagcagagtgatttccagaaggcgtagaatttagtgaccaaggttctttcctttttgggaggagaaagtgaaaactaggatgctcagctggacccaccagcctgagattctggggattttagagctgtcccttggggagccaagcacttggnggtggaggtgatagg

SEQ ID NO: 850 - DNA, 388 bp, Homo sapiens
gacaaagctgcatgcctggtctcaactccctagaatttgaacacacggctcaggggtattgagctgagatcttgagctcaagcaggagaggagccctcactctcagaccacagagaagactgaggtgtgggatcatgggatggcacagcagctgggtataccatgctctggaagaccaatctaggaagggtgtggcctatctgccatcctcagcctctgcctgagggagctccatgccctgcagcacctaacagacaagcaatcggagaacaaaaggcttgggacaaaactagctgggcaagctcagtactgggacagacactggaaggagacctgatcagtcgagcacaagctgggaagtccagacagcaatctctgggaaaaaaac

SEQ ID NO: 851 - DNA, 367 bp, Homo sapiens
ggcctattcctaatggatagagaagaaagacgacagcgggaacacacaagaagaaaacttactcttcgtagaaaaatagaagaggacatacagcgaatgctgctcatcagcgtcaaaatagttcaaataattttacgaaaaaaaactcagcttctgttgtttatcaggcagatgtaccggataatggtataaatcaaaaggaggtataaatatttcaggccaagggtcaattatttcagcgcaggtatcacccacgagaaatttttccagagcttcacaagcatttttggatacttcacaagaagagaaggagaccaatgctgattgggatggaagaccaacccatagatcaagctatctctgcgag

SEQ ID NO: 852 - DNA, 259 bp, Homo sapiens
cggaggagctcccaacccccaccgggtgcaccttgcagaacccctccctgagaatccggtcgggattcgcagcctggacccacacgtgctgctccccaaggcaggtccagcgagtgcacaggtgcagatcccttgctgccacctccactggccagtgcttccggagccaggcgtgcccagggctgcacagacgttagcaccacgctgcacctcccatttcacggagaaggaaaccgaggcacaaaggcgaagcttttcc

SEQ ID NO: 853 - DNA, 393 bp, Homo sapiens
  misc_feature (1)...(393): n = A,T,C or G
cgttgctgtcgcggcgggagccgctgctctccggctgagggaatcagagacagctccgtccctagtggagcgcaggggaggcagaagtcatgacaggcgaggtgggttctgaggttcacctanaaatcaatgacccaaacgtcatttcacaagaggaagcagatagtccttcagatagtggacagggcagctatgaaacaattggacccttgagtgaaggagattcagatgaagagatatttgtaagtaagaagttgaaaaacaggaaggttctacaagacagtgattccgaaacagaggacacaaatgcctctccagagaaaactacctatgacagtgccgaggaggaaaataaagagaatttatatgctgggaaaaatacaaaaatcaaaa

SEQ ID NO: 854 - DNA, 391 bp, Homo sapiens
  misc_feature (1)...(391): n = A,T,C or G
cgttgctgtcgaaactcctgagctcaagtgatccactcgccttggactcccaaagtgctgagcttacaggcgtgagccagtgtgcctaacctcgggggttcttgactgaggcatagcccttggctttctgttttcctctgtctcctctccctgaggtggcttgtctggtcttaggattttgcttgtcacttccttgcttacaactccaaaaactctgcctgggcttctccagtggaactacagtcagatggctgaagcatcccggctcttgggtcccatcttgagctgccaggtgcctcaaatatggactggaggagtggctgtcactgtggttcgctcccatgttagatacagggctagtctcagctctgccactccccatgtgtgaccn

SEQ ID NO: 855 - DNA, 393 bp, Homo sapiens
cgttgctgtcgccaggtcacatggggaagagttagctacaaaactggccacttaatctctggaggggggcgttggtggggtgtgtctgtgtgtgtctcagggggctggagatgcctgcgtgggaggagtgcacctctgaccaggtggcagagtggaaggactgagggctctcagctgagctgtgcacatggcgggcacaggaccggctggctgtgagtgggtgtggcctgtggcctgtgaagggtgggaggagggctgtggagctggggattctgggaagggaatgtcggcccagctgggaggttgtaccagatgacctcagcggcctcttcagtcctgaaaaaaacctcagcatctcctctgtcgttttgggccgtgacaggacgcagccat

SEQ ID NO: 856 - DNA, 394 bp, Homo sapiens
cgttgctgtcgccctcctgcttttttttgagcctctcctgaaactgatagatgctgaaaccactgcaggagcctggcctaacgtggctgcagtctccattactgggcggaagcggagccgggtagcccctgccgagccccaggaggcccctgattccactgctgcaggaggctcagcctcgaagcggatggcgctggtgctggaacgggtgtgcagcactctcctgggcctggaggaacacctgaatgccctggaccgggctgctggggacggcgactgtggcaccacccacagccgtgcggccagagcaatccaggagtggctgaaggagggcccaccccctgtcagccctgcccagctgctatccaagttggctgttctgcttccggagaaa

SEQ ID NO: 857 - DNA, 159 bp, Homo sapiens
  misc_feature (1)...(159): n = A,T,C or G
tagtggtccanaanatgaaaaaataattgaacaaatagaggatatggtgactacagcttctacgtacctgtttgaagccacagaaaaaagattttttttcaaaaatgtatctatattaatttcctagaattggaaggaaaatcctcagtacaaaaggcc

SEQ ID NO: 858 - DNA, 393 bp, Homo sapiens
ggcacgagggaacatgggctttgcagcaaaagcgaagaaatctgctcatgaaaacatggatctgaaccaaatatatgatttgatgcaagagatcacagagcaacaggatatcgcccaagaaatctcagaagcattttctcaacgggttggctttggtgatgactttgatgaggatgagttgatggcagaacttgaagaattggaacaagaggaattaaataagaagatgacaaatatccgccttccaaatgtgccttcctcttctctcccagcacagccaaatagaaaaccaggcatgtcgtccactgcacgtcgatcccgagcagcatcttcccagagggcagaagaagaggatgatgatatcaaacaattggcagcttgggctacctaaac

SEQ ID NO: 859 - DNA, 395 bp, Homo sapiens
ggcacgaggcctatcatacactatccaaatgaagtcattgtcaaagttcacgctgccagtgtaaatcctatagacgttaatatgagaagtggttatggagctacagctttaaatatgaagcgtgatcctttacacgtgaaaatcaaaggagaagaatttcctctgactctgggtcgggatgtctctggcgtggtgatggaatgtgggcttgatgtgaaatacttcaagcctggagatgaggtctgggctgcagttcctccttggaaacaaggcactctttcagagtttgttgtagtcagtgggaatgaggtctctcacaaacccaaatcactcactcatactcaagctgcctctttgccatatgtggctctcacagcctggtctgctataaacaa

SEQ ID NO: 860 - DNA, 392 bp, Homo sapiens
cgttgctgtcgcttgaggaagcccagtacatttcaagttggtcgcggcttgggcattgggaaaggggatgctttgcccccacccaccctgcagccttctccactcttccctcccttggagttccgcccagtacctttgccctcaggcgaggaaggggaatatgtcctggcactgaagcaagagctacgaggagccatgaggcagctcccctacttcatccggccagctgtccccaagagagatgtggagcgttattcagacaaatatcagatgtcaggtccgattgacaatgccatcgattggaaccctgattggcggcgtctaccccgggagctaaagatccgagtgcggaagctacagaaggaacggattacaattctgctccccaagag

SEQ ID NO: 861 - DNA, 388 bp, Homo sapiens
cgttgctgtcggagataaggactgagtgcagaagataagagaactcgcatgatggaaatattttctgaaacaaaagatgtatttcaattaaaagacttggagaagattgctcccaaagagaaaggcattactgctatgtcagtaaaagaagtccttcaaagcttagttgatgatggtatggctgactgtgagaggatcggaacttctaattattattgggcttttccaagtaaagctcttcatgcaaggaaacataagttggaggttctggaatctcagttgtctgagggaagtcaaaagcatgcaagcctacagaaaagcattgagaaagctaaaattggccgatgtgaaacggaagagcgaaccaggctagcaaaagagctttctt

SEQ ID NO: 862 - DNA, 303 bp, Homo sapiens
gctgctctaccctttaatggatatgtgtgcattgaagatgtctggatgaggagactaattctagaaggcagacgtgcctcaataaattaaggccttccctaagaaacccgagaaatatatagattttgtcttaaatgtttgtgtgagatatttgcttttcaggcacagatatatcaagtttttttttatttctatgtttatattgatatgccttccacatggttaattaaataaaaagaggggaaaaggagaaagaaaaagattcagagcatcatttgttaaaaagaaatgtatcattcaacc

SEQ ID NO: 863 - DNA, 385 bp, Homo sapiens
cgttgctgtcggaaggtattctccggccttagaaagcccaggattaatgcaggattgcgatatttaaacagaacatttccatacagcatgagtataaatgactttcccaagtttacactgagagtaactgacacagcaaccccagcaaagtctgagctgagtcctgaataattgtataaaaaggggagagaaacagagtgaagaaagggtttcccagactctgtcccaggaaagaaaatgagctcgtggagaggaatagactttctctatgaaaacagagggaacaaagaggaagatgtctgggaaccgaggagtaatagagacctgagtttacatcactactctgccactccctaggtacctccctttacctgtttccctactg

SEQ ID NO: 864 - DNA, 357 bp, Homo sapiens
gagacagagagattagacattgcaatgaacaaactggttttgaccattaattacattccctggatacttgctcaattcaccacacatttttttttttctgaatcaacatgaaaaagactggcttagtctgcatttaaagcatttcgtacattacaatgatcacatgctacaggatttgtaagtgctcaaggatgtgttcacagctagggaagtaaagccgacataaagaaatgaaatccagtttctgtcttcaagacacttacattcttgcataaagtcaagaaaatactattaggaaaacaatactttatattgggtgccttctttatctggaggatggcaaacaaccaaatcatg

SEQ ID NO: 865 - DNA, 359 bp, Homo sapiens
caatgagcacaagggaatacattatagttgattttgctcaaacttaatttaaaagcctcattttcctagaactctaattattcagatattcatgacaatatttttttaacagtaagaaactctgagttggcttcttggagctgtaggtcttgaagcagcaacgtctttcaggggctggagacagaaacccattctgcaatctcagtagttttttcgaaaggctgagatcatttattgatcgagatatgacttgttactagggtactgaaaaaaatgtctaaggcctttacagaaacatttttagtactgaggatgagaactttttcaaatacaaaaatatattggcttaaagcatgagg

SEQ ID NO: 866 - DNA, 142 bp, Homo sapiens
  misc_feature (1)...(142): n = A,T,C or G
tcctgcaccaaagaaatgtaaaacaaacccagagagtgacattgagcagctttaaagtgacgttgttttcctttcacctggtgaatttgagaacgcagtggcttttgagactgtcctgccaagtggcangtgaggcatggag

SEQ ID NO: 867 - DNA, 360 bp, Homo sapiens
  misc_feature (1)...(360): n = A,T,C or G
tctcctttagctgctacagactccctgctctcttccctttccagcaaacactgtctgcttcctcttgtcccaccagctcttgaactcactcctttcaggctccatccccaccaccccactgcatccactaatgccaaggccacctccatgtggccacatccaatgaccatctctctgccctcaggtccctggttgaacatgtcagcagcatttgagtagctgacctcctttgctttcaagaaacttttcctgctcttggatctcttcctgtctccctagccagattttcctacttctcccttactgattcctcctaatttcctccatcatgaagcactggagtgtcccagggttcagtcn

SEQ ID NO: 868 - DNA, 351 bp, Homo sapiens
attctctatagtgtggatatgaatctatccatctatctatatatatttatcttggaccaactatctttttatacagtgtggatgatcagatataccgcacaaatccctggccagtgggagaagttccccttactactttcagggccacttctcagtggaagtccattttcagctggtatcacacataacaaaatggcctattttcagcatgtgccacacagaccaagactggccttttctgtctccattatcaggtcaaaaggaaacacacatgatgccataggagtgagatgaggtgcaattttggtagctgacaatggggcctgggtcacctgcttgcaatgtacttgt

SEQ ID NO: 869 - DNA, 357 bp, Homo sapiens
gagttccaagtagggaatccttctgagaagtcccacctttctgagcagctgtgtttgaagaaagctagtgggaaaagttccaggattacatgtcaggaaactacaagaggtagaaacatttgttgatttaccagtgtttttaacttcctgctgggctgaaaactgcttgtttcgtggaaaagcaaaacttgacagcaaacatctaaaatgaagagctcccaaacttttgaggaacaaacggaatgcattgtgaacactctactcatggacttcttgagcccaacattgcaggttgccagccggaacctatgctgtgtagatgaagtagattcaggagagccttgttcttttgatgtg

SEQ ID NO: 870 - DNA, 384 bp, Homo sapiens
tacggctgctataatacgacagaagggcacacacacacacctttttttacactgagagaatgagaaaaacattaacttttagttctccgtgggccttattttcttaaaggaggaaatcattacacagtaaagcattaatggccagtgtgtgcttaatttaacaacactacaaattcatgtagagatgtctgatcctctagagaggaaactgtcattccttagctgcagtcccctcttcaactgaagaattacatttcaccactaggtgtccacaggggaacaaaggatatcttacacttgcccattccaagtccctttcacacacactgcactccataaacaacttgtcctaggtcaatttataaaaaccttaaatcttatttt

SEQ ID NO: 871 - DNA, 358 bp, Homo sapiens
tttgtgggaggaaccacttccactctcagccactcaaggtttatcaggatatactagttgagaagcatgaaaaataaaaactggtaatttcccataaccaaaacaaaaagtgttacaagatacttaaatgatccttggcaatacttttattctatttagtatatgattaggagtttagtagattaaaaaacccaccacataaaagacaactggtatatattctcctcagacatggtaatgtgatgtaagggagtaaaccttgaacttcatttttgtatgggtcataaaatcgcatgagtcatacttgggtagaacacacatgattttcaataacaagtttgtcttccacttcattacc

SEQ ID NO: 872 - DNA, 330 bp, Homo sapiens
gggagcctgaggaggggcctcacccggcctgaggaaactcactgagaagtggaggccgagtcagagcctgtgaggcaggggagtggggacagtctcagcccaaaaaacaatgctggcgagaggcaggtgcaggggtaaggtcacaaggagggaagcgcagccctttcaaggcaggagagaaggcggcaggagagaaggcaccaggacaagggacagaactagagggagggtaggacctggcatttaggaaccagcatgtggctgggcctgggcgtgaggttaagaagggagagttggccgggcacggtggctcacgcctgtaatcacagc

SEQ ID NO: 873 - DNA, 355 bp, Homo sapiens
ggtggcatgtacctgtattcccagctacctgggaggctgaggtgggaaaatcacctgagcctgggaggtcaaggctgcagtgagccatgatcacgccactccagcctgggcgacagagtgagaccctgtcttaaaaacaaaaaacaaaaaaaccccaaataagcagaaacaaaaatgcagaagacagaagtctaagaatatattaaaactgtattctaatatagatgttaaattctaaagtcagcagataagtagaaaatctgtaaatataaaactgagtttgaaaacttcaggacttaaagcaggcagtaagaggaagtttggtggagagacgatattgttagaatgtaaacct

SEQ ID NO: 874 - DNA, 358 bp, Homo sapiens
  misc_feature (1)...(358): n = A,T,C or G
gattttaggacttggtgtttctggcatttcataggaaataaataaatcaaagcctacagtaagcaaccttcttaatacatcttggaaggggggaaaaccccaagacccttatttaggatgaatatattaatacaatacaaagcacccaacttctttctgggaatgacttaaganatccatcagcagaaggagacagttgcacttattatgggatttctagggcatgggggcgcanagacaaaaaagagcttggtttactttttcaaaacatgaaatgctgattcccttcttttgctatgctattcaggccttaaagggaaaagcacaaaagggttcttgggcaatgaagaaaaataag

SEQ ID NO: 875 - DNA, 357 bp, Homo sapiens
  misc_feature (1)...(357): n = A,T,C or G
taaactgaaaaatgagtctaaatgcagccactttgctattttagttcttcataagactggaagcaaagcaattttactgaaatgttatcagtgaaactactcactctacaatgaaacatttgtgtttacttttgtggttagatattttgtggttaatatgtgtcaaatctttatccaaacacaaatggtataaagagatgagtaagacagtctgtggctcagggctactttgttgtaaaaacccagcgacaccattctgactgtggtcctactggttattctctatctagcaccaagatctttggaagacatgttaagcaattatcttatcactctactggtcacaatcctccaaan

SEQ ID NO: 876 - DNA, 326 bp, Homo sapiens
ctcttccactaacacagggaaattccagcccagtcctgaggaacatggtcaggtcgatgggtttaattaattcagtatgcaaatgggccatgaggtttcttaaaagagatgacttaaaagatccttttctaaatgatgaagtccctcagccccacagacaagaatgggccccaaggctgggcgcagtggctcatgcctgtaatcccaacaatttaggaaacggaggcaggaattcaagaccagcctgggcagcagagtgagactctatctctaccaaaaataaaaattagttggccgggcgcggtggctcaagcctgtaatcccaa

SEQ ID NO: 877 - DNA, 357 bp, Homo sapiens
  misc_feature (1)...(357): n = A,T,C or G
attacattttattgagctcttagtatagtcattctactaattatcaagaattgttaatcctttaaataccatatttagtcaatacattagcccccaaaacaagtaaactaaagctaagtgagactaaataatcagaagtcaaaataacttgcccaaggtcatatgtaaccaataagttggccacatcttagagtaagttcttagtcgctaacaaagntcacttagtttttttttgagacacagtctcactctgtcaaccaggctggagtacagaggggcgatctaggctgaatgcaacctccacctcccaggtgaaggagagttttctgcctcagcctccacaataactgggaatan

SEQ ID NO: 878 - DNA, 360 bp, Homo sapiens
attgttatccgaaagagagaaataactcctgttaatcaagaaaaagacagaaacttcaatgggaaaaaaaggaccaatgaaagagacaaactaccatagatcagatttcttcccatagctaaacagtatacaaagaaacttcatatttataattatacaaatgcaaatcaaggcagtgagtcattactcttatcagaaagactctaatttaaaaggataaacacaacaattattagaaaatgtgcatagtgttaactttcactcacttgtagtgaaaagtagtctggaaatattttatacatcatagagaaattccgagaatcatatacaggtagatgatgataaggattatggtattgg

SEQ ID NO: 879 - DNA, 225 bp, Homo sapiens
ttccgttcaaattctgactatgtagtattttagcaaacctatgctagtaacattagaaaaaaaataaatttactatccatagactttatgaaggtcatacatgaagaaatgggtgttttagtaagaaacagaaatttcttaagcttctcattagatttctttagattttagttcaaaatagatttgagtgagtttatttctgatgcggtgctttaccctgattac

SEQ ID NO: 880 - DNA, 353 bp, Homo sapiens
cagataatttttttaaatctattattaacatgttcaataaaaagatgaaaagatggagaattttattagagaaatggaatatctaaaaatgaattacttgaagagttgctaaatgaaatgcagaataactgtaagtgaaaacacagttggtgtaacagcggattagccaaagcagaaaacaggtttgctggaaataaccatattaaaacatgaagaccagaaagaattgcaaatgcacaaaacagcattagaccacagggagcatgattttataaaggtctaggccgggcgcggtggctcacgcatgtaatcccagcactttgggaggccgaggcgggcagatcacgaggtca

SEQ ID NO: 881 - DNA, 360 bp, Homo sapiens
gttagaagggtcatacaaggctttatagaaaggatttttaagatgagcttctatatatcaattaaaagaacatttcagtagaaacatgggcgtatggtatgataattaccagaagacaaatgcaaataagtgctgaacacaggaaaaaaataatcaacctctccaataatcagaaaaattgaagttaatcatcattaactgttgggggagtagctaccaaatttgataaaaactcaaaaattcgtaataattcagaaattgagaatagcggccgggcgtggtggctcacacctgtaattctagcactttgggaggctgaggcgggcagattacgtgaactcaaaagttcgagaccaaccg

SEQ ID NO: 882 - DNA, 385 bp, Homo sapiens
cgttgctgtcgggcaccgagcctattctgtcgcgttgttcttatatacatacacggatgacgaccatgaggacagtgggcatcaaacattttggattatgcgttattaatcccttatatcactaaaatgcaacactgctgtggatgctatccttaatatatactgacttatagatgcagcccactcgaagttttgtgccagccttcttacctatattagacaacgacttcaacagcgcggttgctaatgccacgcaaccaccatgtgttatgttagcctgcttggatcaattgtaattattactggaattgaattaattaatatgattttgaacagatcatgttcaaactaacatcctgtaaagtagacactgtaaggagttact

SEQ ID NO: 883 - DNA, 383 bp, Homo sapiens
  misc_feature (1)...(383): n = A,T,C or G
tacggttgcgagaatacgacagaagggatgtcaatgcaaagcccagggctggaagccaagcgtgggcggcctctgttcgccatcggggtgaagcctcctgtgttcgttcactgccgtcggggtgaacgccatatgggcaggtgactgggtgctctcgaacctccccgccaagcccaaaaagccacataattaaatgcaatgtcggggccgggcacggtggctcacacctgtgatcccagcgctttgggaggatcacctgaggtcaggagttcaagaccagcctgggcaacatggtggaaccccgtctctacttaaaatacaaaaattagctgggcgtggtggctcacatctgtaatcccagcactttgggaggccgaggtggn

SEQ ID NO: 884 - DNA, 357 bp, Homo sapiens
attccccagcaagatagagataatagcttccacttgccttctcaaaacacacaaataacattcagtatgtgacagtattattaaacccattatggtccaatataatgacacattaacgtacctatttctcaggcagattatgggatatttggagcatggaactaagtactaatcatattttggggtttctctgtattctccccaacacttgagttggcacataagatgtgttacatagacatttgttacgtgaatgatttgatccttaactaggggtgggacacaaaatattccaataaagattatcgcaaaattctcttaattcagtgctgatttcctcttcagatggcattgtta

SEQ ID NO: 885 - DNA, 356 bp, Homo sapiens
aaattatagacaagcacaaagaaaatagatatcgcctttaattccaccacacagagataatctctgttaatatttcagtatgttgttggtaatcaatatcccatcttttgtgcatatgcagattcttattttgtaaacatgagacactattatgctttctgtgttgtaacctcctttttcacttaatatatcatgaactattttccaggttattaaatatgtgacaaaaatgtctttgattcctttataattttctgtcacatactataaagctcctctgtgattttgcaataaattaacttgttttgtcactatacagacgtaagctttttaaaaaaaaatcaactcctaatatg

SEQ ID NO: 886 - DNA, 357 bp, Homo sapiens
cataataggtgctcagtatttattgaaggaaggaatgggaaaaggaaaattcattctgcaagaacagtagaatcctactttggccccaccttattttatttgtcacttgacctcagttatcacatctttctgaccttgggttgctgttaggtttattgttaaaacatacactaaatagtttatattttaacttgtaattgttgtctagctctggacaattggagggccgggggggtgctctcctatttagagaacacgggaatacgccgggcgcgttggctcacgcctgtaatcccagcactttgggaggccgaggcgggcggatcacgaggtcaggagatcgagaccatcccggct

SEQ ID NO: 887 - DNA, 357 bp, Homo sapiens
aggagaatcacttgaacccgggaggtggaggctgcagtgagctgagatcgtgccactgcactccagcctgggcaacagagcaggactccgtctcaaataataataataaaacgtatatcactaataacaaatagatgagatttaatctctttagatgggaacaatccaataaagtcctacaataatatagggcaataaattttggagagctttaattactgtgcaagaaaaatattctagttgaaatgaagagtctccttggcctgtttccgcacagcagagcaaaccgtcttctccattcacatttcttggagttaagagcctggcctatgctgggcgtggtggctcacacctgtg

SEQ ID NO: 888 - DNA, 357 bp, Homo sapiens
  misc_feature (1)...(357): n = A,T,C or G
ggggtttcaccatgctggccagggtagtctcaaacttctgacctcaagtgatccacccgcctcagcctcccaacgtgctgggattacaggcatgagccaccacgcccagcccctccctctattttatagacatggaaacagaggcatgggggaagttaagtgattttggatacactgctaaaaaccagtgtatctcaaatgcagtggaaacatggccttgcctcacaggattaggactaaatgaagtgaaggatgtaaagaggctagctcaggcccagcacatattaggcactcaagaagggcaggtcctccctccttctggcataggggaatgaaagatgaggtgaggcagggacn

SEQ ID NO: 889 - DNA, 326 bp, Homo sapiens
  misc_feature (1)...(326): n = A,T,C or G
ctgggaatacaactgttccagcaaaagggcccctgtcttgggaaggcccaggctgaggaggggaggatggcccgaccttatgggacatagtcagagactatgctttcaagcctccatggcctcccttgcacggcagagaagtgggtatagaaagtatggtcagggagcccagtggagacggagctggccagccaggaaggacctangtattctgggcaggagggtgagaagggctccctcctccaggcctgcccaggccgcctcctgctccaagctccgctagctgccccgggctccgctagctgccctgttccccgcaccaccac

SEQ ID NO: 890 - DNA, 360 bp, Homo sapiens
atagatgagatttaatctctttagatgggaacaatccaataaagtcctacaataatatagggcaataaattttggagagctttaattactgtgcaagaaaaatattctagttgaaatgaagagtctccttggcctgtttccgcacagcagagcaaaccgtcttctccattcacatttcttggagttaagagcctggcctaggctgggcgtggtggctcacacctgtaattccaacactttggggggccaaagggggtggatcacctgaggtcaggagtttgagatcagcctgggcaacacagtgaaaccctgtctctacaaaaaatacaaatattagccacgtgtggtgacacacgcctg

SEQ ID NO: 891 - DNA, 384 bp, Homo sapiens
tacgctgttatattacaacacaaggggaactggctttctttgattagataactccatgccatatctaatttttaaatgccttgcatccacacttatcacaccaaaatactttaacattctttaagtcttaattcttatctcctcaaggttttgcgggaaagagggacaggaataacctttcacctttgtctctgatgacagtcagcgcaaaactactttatcatcccagcagggaaggccaatacattcccagcaagtataatttctaccagaacaactcatgaaatgtggtaagaaatagtgtgcgggcgacttaagataatactttttaaaaaaaaatagagaacacagttttaaaaatctttctttttaaaacgagatctg

SEQ ID NO: 892 - DNA, 355 bp, Homo sapiens
attcctaccaagtgacaaaaaaatctcaagagagttatcaagagagggaaaaagagagaaaacactaatcagcagtgaaccaattcctctcatatgtatgtaaatagataaatcagtgtataatgttaaataatgatgcagcaattaaaaaatttaaaaatagtctgggaccaaaagaagtaggggattttgtcaaattcaataaattgaggtaggaaaaggaataaaaaagtaaaaaccttttccaaaggtaatttagagtgaagcagtaaagatattttacaagtttcatcttttgggcctgagggaaggcacatttgtggaggagaaatggtggcttgtgttgtttcatgta

SEQ ID NO: 893 - DNA, 358 bp, Homo sapiens
tagaagcatttgtgccttgaaataaatctctctttggggaatgagttatatatacatccgtgtggggggacctatgcacacatactcacacgcgcatatatattatgcattacagacaaaatacatgggcaaatccccaagcaggcagccccgagcttctgggagggaaggtgatccgcctgttagcttcaaaggacatttaaagaatagtgggaaggccatgcgcggtcgttttttttgacctgggcccatttgtgagcgcgaagcgtgatttattcttcttacgtatgaggtggtcttcgcaccttggggccaaccgtcttatgtttctgccgtttcgctttcccgtgtatcttcg

SEQ ID NO: 894 - DNA, 355 bp, Homo sapiens
ggtgcacattattgaactcctactgtatactaggatgaacaggagccagtccttgcctttgggaggcccaggaggtgatgaggaggacagacgagaaacatgtatttttttttaaccttaaaatcttttatcacttcaacatgtagatttcaacattaaaagcgtccctgctgggcaacaagcagagtgcacaggttcctggcagggctaagttcttggcgcatagcctacagggttgtaggtcagaggctgctgggagtcagcaagcacttgtaattcgcagtgcctcccctgcccactcagggaggtgatgctggctggctttagggacccttcaggtggggcagaacccagg

SEQ ID NO: 895 - DNA, 331 bp, Homo sapiens
gacatgatgaaggcaggggcccaagggaggaggctgtgaggctgtgaggctcaagctggagtcttgtttcctgcggtgcctcaaccaggacccctgctcctctcctccggctccagcacaacgaagcctccttcattaagtaaacagttccttaatgaataaaggaaatgggataaggaaaaagaaacaagaagaaaaacagacagaggtgcttttgccaggcatttagactgattttcccgtttaattctcccaacctccagaaatgaaggttattccagtctttgtcagagaggtggagcatcttgctgcagatcccacagcttgaaaa

SEQ ID NO: 896 - DNA, 381 bp, Homo sapiens
cgttgctgtcgggacaaccttcatttaaaggcactttggcctttggccagagttcagcgggccacactcaggctggatgggctgcagggctgcaaatttgaaacagcaacaggtgctgacaggccgagcagctggggagagactggcacaaaggagtgcacatgccctggcccaaaggcgcacccacctcccagctacaggggactgtggaccctaagttaagggcgcctttaaatattcattctcggacctcattttggattcattattttatattcatttccttaaccagggcctcacaaatggtatcagtttaggccctagaaagcctgggccctggggctgggcgcggtggctcatgcctgtggtcccagcactttg

SEQ ID NO: 897 - DNA, 353 bp, Homo sapiens
tgggagagagccatggtagaagtggatctttcagccccgtcaagtctttacatgactgcatccctggtcaacatcttgacagcaacctcaaagaccttgagcctgaaccacctagccaagttactctacaattcctaaaccacaaaaacgatgagatagtaaatgtttactgctttaagttgctaattttggggataatgtgttacacaacaataaataatacattaacctgttatggggttgaattgtctccccaaaatgtgtggtgaattcctatacccaagtacctcagaatgtgaccttatttggaaataggatcgatgcacatgcaatgatttaagatgcagtcatag

SEQ ID NO: 898 - DNA, 359 bp, Homo sapiens
caggcccacaggcacccacccccctgcctgacagttggcctaaagtcagcccaccccaccagagagagctgcgtatagcctctggcctgcaagcacctgccccaggattgacaactggtaaggtggcaccaccccaccatagaaggttaccagcagcagctacccacatgtgcctgcccttggccttatagccagccccacctcaccagagagagttgtgcacaactgttggacatttacccaaccctggtttgacagccagcttggagatggccctgcaccacaggaagggatcttgtgcagcaaccaagccatttatgtcttccctggcctgagagcaagcctggaggggaccctac

SEQ ID NO: 899 - DNA, 327 bp, Homo sapiens
atgactctcttcttttttcactgctggttattatttgtaactcacagggcagaataacagctctagagctcaatttatctggaggagattcagcacacctgcttctctttttccactggcatggctcttggtgcaaatttgtatttatgtaatagttagaaattaaacatcagcaccaacagaaaaatattcaacgccctttattaaacatcaaacaactttgtcaatgggaaaagctgccccaactgttttagatcttacctctcaacattgttgtcaaagtacctttccactctctggtagtgtctttgagagggtttgtctatt

SEQ ID NO: 900 - DNA, 381 bp, Homo sapiens
cgttgctgtcggagacttcccaggaaggtccagcgccctctcagccttcgtactcagaacaggcgatgatgggcctcagtaacctgagccccggtcctggccccagccaggccgtgcctctcccagaggggctgctccgccagcggtacagagaggagaagaccctggaagagcggcggtgggagaggctggagttccttcagaggaagaaagcattcctgcggcatgtgaggaggagacaccgcgatcacatggccccctatgctgttgggagggaagccagaatctccccattaggggacagaagtcagaatcgattccgatgtgaatgtcgatactgccagagccacaggcccgaatctttctgggatccctgggggg

SEQ ID NO: 901 - DNA, 351 bp, Homo sapiens
aacacattaaaagccacagttcagggatatcagagctagagaaaaactgtcaaaaagcaaatgcagagagccttgaggttatgtgtggaatacccacgaggaggaagtccttaatcagttatcttgcaaagactcaacagaacctgggcataaacccagacttgagcaaacactaagacaatggctcctgcaagaactgtctcctctcaatatttggagtatgtcagatacagcagtgcctttcagaatgtgcctaacatccctaaagaatttgaatatgccactctttttttctgatttaaaattttcttactgttgcaaattaagaaattaaaaagatgtttaagattt

SEQ ID NO: 902 - DNA, 273 bp, Homo sapiens
  misc_feature (1)...(273): n = A,T,C or G
tatctctaacaccactattaaggtacaccagtgttaaggtacattaataactacacaaaattttatttaaagagaacacttagcagcctatgatagttttcaataaaatgttgcctctctttcggattctcactaacttttgttactattctaaaagtttgaatttgctggggtgtttattctgaggattatttaaccattgttctatttggcataaccctatttaatggtgcttagagctgaattacctacagaaactgtttctggtttaan

SEQ ID NO: 903 - DNA, 386 bp, Homo sapiens
cgttgctgtcgggtcttgactgtagcccagctcaggctggaactgctccctgtccccaagccagcctccctgtctctcttcaaagagtgtgagtccctttaggtcctggtgtgtggggacacacctccttcctcctctggcccggaggcttcggagcaggagagcctggagaagtgggggcactgtcggggctcctcggtacacagaccacgggacagatgcgtggcctggccctggcatccatgggcaaaggagagactgagacacaccgatgtgtcaccatggcccggtgcccagccttgccccagccccagctgggggcagcacggagtcctcgcacggggaagtcagtgtggggcgtatgaggaccaacagctgggtcctgg

SEQ ID NO: 904 - DNA, 357 bp, Homo sapiens
ggtgggcagccaggcacccagcctgagccgtgaccagaggtccgagccatagatgcagccttggaatctcagcctgcggcgctggccctggtgccacacttagcatgggggacgccaggctggagcagacgccatcccaaacaggcgctctgcccccggggactttggcaaggctgctgcctacgtgaaatgatggaaaggtctaggctggccccaggtcctttctggcatggcctcaggatcttggcaggaggataacaatgccaggagggggtgggctgagtcatgtgcctcctctcatgggcctggctgcagtggtcaggggcagggtggctcattgtgcgggcaccggtgccc

SEQ ID NO: 905 - DNA, 358 bp, Homo sapiens
aagcagtcatgtgattctaaattcaccattacacccagtgaccactgagtctggaaacagaatatatatagcaatatccatgtataatatacatttgcctgtgcttctcaacttcgtggccacccttttcatacaaacagaaaagctcaaagttggacaactcttaccttccaacaattcctcaaaatcatccacaaagaactccttcagtggagggcgctttggcctcttcagggtgttcagaaactggtggaatttggaggacactctgctgttcacagggacacctgtcacgggaaggacagaggaacactgaggccaggacacatctgaaaaaatggacacatggggaatggcc

SEQ ID NO: 906 - DNA, 360 bp, Homo sapiens
agggtggtcagcgatgctggggagatgtaacctcagaaaagcaagattaagttatagctatcccacagggcaccttcatgcaattagaagaaagtgtccctccagaagatgcagccccctccaagggccatgtcttggcaaattcatcagcccttgtataaattataaaaagtcaacttccctgggtagatgcagccccagaggtatatggctttgtgaagagccagatttcagcaccaactggcctacagaactatatgcggtggccctggttgtttttttgttaccagatacatagcaacttatcttgtgtactttgtcggctctctgtagtgaaacatgggatttattcctaattta

SEQ ID NO: 907 - DNA, 382 bp, Homo sapiens
  misc_feature (1)...(382): n = A,T,C or G
cgttgctgtcgggggctgcgggcgctcgctggtggcggacccggaggctgctgcggcgccggggctccgtggcctggattgaatccgatcgggagccatgagcgtggacaaagctgagctatgcgggtctctgctcacctgggtaggtcgtggggcggggctaggggaaggtgagcgcccgctcctcttgcccgggatccctggccctggttcggtcagtctcttggtgctggggctgggaggtgcggggtcgtcgacttgctggaccgttggactctggcccgagcacccgcccccgtcacgtggcaagtctgcgtggaaaggacaggtgaggccccgcccctctgtggttggttcaccgtgggcgaggacacaggtgaan

SEQ ID NO: 908 - DNA, 381 bp, Homo sapiens
cgttgctgtcgggcccccgacagtgctaccttgcttgagaagatgaagctcaaggactctctctttgatctggatgggcccaaagtggcatctcctttgtcccccacatccctgacacatacctcccggccccctgctgctcttacccccgtgcccctttcccagggggacctctcccatcctcctcgaaagaaggaccgaaagaaccgaaagttggggccaggagctggggctggctttggggtgcttcggaggcctcggccaactcctggggatggggaaaagagatctcgaatcaagaagagcaagaagcggaagttaaaaaaggcagaacggggggatagactcccacctcctgggcctccccaggcaccccccagt

SEQ ID NO: 909 - DNA, 380 bp, Homo sapiens
cgttgctgtcggacaagaatcccacccttggccctgacactggcccttggggccttactgaatcaccgcaagaacaagattcattgtggctttggactcaccatcggctgagccctcctggtccccgccttgcaaacccttccgattgcaactccatctccacctccccctgccacagaggggagacctgagcccccctcccttccctccccccttgtgggtcggtgggggacattagaaaggagggacccccccaccccaacatctgaggaggggattctggaactgaatggggcttcgggagtatgagtaccaggggcttcatgcccagcgggcctggggtcccgggagggattgcacaattgagagtgacgcacgag

SEQ ID NO: 910 - DNA, 354 bp, Homo sapiens
gaggagagtcactacagacaccaagaatccattcaggcatgtctttaacttctacttcccggtactgcctgccacaattttatcccttagaacccagaacagctgggagcagataaaatcttcttgggttatgagttcccagatgatgctgctggcctgcggactgtactttgtgaacttatgctggagcagatggatcagaaaccccggccagaggatgctcaggacccatcaagcccccgcgaggaaggactcagacccccaaccccaccaaattaaagcaggcaatggagaattatactgaagggattcttcggctgggcaaaaacatgattagatctgcattctaaagaa

SEQ ID NO: 911 - DNA, 333 bp, Homo sapiens
  misc_feature (1)...(333): n = A,T,C or G
cctcatttagtgaacatccaattcagaagaaaaacaacagtgaagacattatgtatttatgcagactacaaatctgatgaaagctatactccaagcaagacctcagtcagagtaggaaataattttcacaaccttcaagaaattcggcaacttgagttggtggaaccaagtggctggattcatgttcccttaactgacaatcataagaagccaactcgtacattcatgatacagaatgctgttctagccaatcaccagaatggaagagacacccatatgagacaaatttaaatatacacaccaggtagaagagagctccattggtaaatttcn

SEQ ID NO: 912 - DNA, 386 bp, Homo sapiens
cgttgctgtcgcccccacctccccgttctagccagcaacatggatctcctgtggatggctgaagccaagatgcccaggtttggacatggcacctttctgctgtgcctggaaaccatttaccagaaagtgacgggcaaggagctgagatacgagggcctgatgggcaaacccagcatcctcacttaccagtatgccgaggacctgatcaggcgacaggcggagaggcggggctgggccgcccccatccggaagctctatgctgtgggtgataaccctatgtctgacgtatacggcgccaacctgttccaccagtacctgcagaaggcaacgcatgatggggcgccagaactaggggccgggggcacacgggagcaacagccctcacg

SEQ ID NO: 913 - DNA, 245 bp, Homo sapiens
acagaaccacttcaactccttctttctctccaagtgtacacaatgtgacagggactgtttctcagaagacatctccttcaggtgaaacagctacctcatccctctgtagtggcacaaacacatccatgatgacatcagagaagataacagtgacaacctccacaggctccactcttggaaacccaggggagacatcatcagtacctgttactggaagtcttatgccagtcacctcagcagcctta

SEQ ID NO: 914 - DNA, 380 bp, Homo sapiens
  misc_feature (1)...(380): n = A,T,C or G
cgttgctgtcgggagcgatgagggtctgagacggtgggagcggttgtgtgaagatggagtttcccggaggaaatgacaattacctgacgatcacagggccttcgcaccccttcctgtcaggggccgagacattccatacaccaagcttgggtgatgaggaatttgaaatcccacctatctccttggattctgatccctcattggctgtctcagatgtggttggccactttgatgacctggcagacccttcctcttcacaggatggcagtttttcagcccagtatggggtccagacattggacatgcctgtgggcatgacccatggcttgatggagcagggcggggggctcctgagtgggggcttgaccatggacttggan

SEQ ID NO: 915 - DNA, 164 bp, Homo sapiens
cactgctttgtaagtcttttcttattttttcatatgtacatttgacttttccagctaggctgtaagttccctaagggcagggtgcatattttccatatgttttggcacctatactaggcctgggtatataggaagcaattaataatatttgttaaggctggggg

SEQ ID NO: 916 - DNA, 344 bp, Homo sapiens
agctgggactacaggcgcccaccaccacgcctggctaatttttttgtgtttttagtagggacggggtttcactgtgttgaccaggatgatctccatcttctgacctcgtgatccacccacctcggcctcccaaagtgctgggattacaggcataaaccataaaccactgtgcccggcctcttttttttttttttattccatggagggacctctctttttaccaaaaattccccccactgttgtcctgttctatttttgtgacactccctgatctcgtgtcgctcgcgttatcccccgccccctgtttttaattttttttgtagactccgcctcacccctccccg

SEQ ID NO: 917 - DNA, 346 bp, Homo sapiens
  misc_feature (1)...(346): n = A,T,C or G
catagaggagtaattgggtaattcctgtgtcttagggaagtctctctggctcccgaggacagcatactagacacagaggaccaagtagtgggctcctagtatccttctggtggccaaagccttcacagtgaaaatagataggaagagccacctcgcctggcccgatatttgtttttaaaaggctgggcatggcttatgcctgtaatggtagcacttcgggaggccgaagtaggaggatcacttgagacaaggagtttgagactagactgggcaacatagtgagagcccatctctacagaaaaattttgtagggccgggcgcggnggctcatgcctgtaatcttagn

SEQ ID NO: 918 - DNA, 345 bp, Homo sapiens
gacaactgactgaaatttaaaaatacttcccaagtccacatacagacccatgagccgaggaggaagaattataggctcaaagtgtctgagtacaatctctaacaaatcatcagctgaccactaagctatatagatatagatgttacccctgagaaccctggatgaaaaaataacaataactgagcagagacatcagcagccacaaatcacaggaaagaaagtttctaaagggctaaatcatccaagcagacaaaatattaccatcaacaaccagcagggaaaaaaaatcatcataatccagcgtagttaaaatattatttatcgtgtccagtgttcaggtaaaat

SEQ ID NO: 919 - DNA, 294 bp, Homo sapiens
gctccccacccattcttcactgaacctcctgctccagcctctgcctcctccattttgatgtctagaatcaggggatccaggatcatcaccaaggtcattttcccagacagatgtgctgaggctgtagaaagtgctttttatttggttgggagcttgtgcataaatgcgagaggggctgcacatctgacggactataggtgactcatggctgaaccggaacaggacatcggggagaagccagcagtcagaattcagaaccccaaagaaaatgacttcattgaaattgaactgaag

SEQ ID NO: 920 - DNA, 375 bp, Homo sapiens
tacggttgctagaattcgacagaaagggctacaaaataatcaaaacaaatcataataaaaacggaagaaaaaaatatttcagcgttccttagactcttacaatgtaattcaaactgagttgtaatttcaatacacttcttctgttaatgaatgtgcagataactggtttaattttccattcaataaatttttcttataaagatgaaggaaggccatgcgtggtggctcacacctgtaatcccagcactttgggaggccgaggcgggtggatcacgaggtcaagagttcgagaccagcctggccaatatggtgaaaccccgtctctactaaaaatacaaaaattagcttggcgtggtggcgtgcgcctgtagtccc

SEQ ID NO: 921 - DNA, 351 bp, Homo sapiens
cagcacacaaacagtggcttatccaggtccatcatattattacaaaattactattatcactattatgtaataactgtttgcttaaaactattttgctttcaatgtatttgaaacactttgcttatctaacacattaaagctataaagtcatataactttcctctccatttcacaagacagaagataagctcagaagactggacctatgttgaatggtttggctaggatgacagagtcagtatgaggaagatcttggacctaagtcttctctttatgtcactcttttatcactctgcattgtcagttgtacatacacattaaattgagtggtgacaatttgttaggagataa

SEQ ID NO: 922 - DNA, 322 bp, Homo sapiens
agctatatatatacaacctgcaacaggagggtcgtagaacccagaagcattagtcctggaggacttcctgaaagaggtgagttttggctaagatcctgtcaatgatgctggcatagactataagagaggaggctgggcacagtggctcatgcctgtaatcccagcactttgagaggccaaggcaggcggatcacctgaggtcaggagttcgagaccaggctggccaacatgaggaaacgctatctctactaaaaataaaaaaattagccaggcgtggtggtggacacttataatcccagatactcgggaggctgaggtagga

SEQ ID NO: 923 - DNA, 349 bp, Homo sapiens
gggacaaagagctacctggcctgtaatgtcgatctttggtgattgagagacccctgcgcccaaagacatccctaaccttcaggatttaatcctcttcagtcaaacgtttccttaaccctatcagcccatgtttttcttttcttggtgaaagctgagcacttcataggctgtttacaggtccttctccacaggaaaatacttcctccaggacaagaaccctgtcttggttccaaactttcccaattataagagtcacctttgcgcttgttaaacctgcttccaggtgcttctcctgagggtttctgattcagctagactggagggggggaactgacgaggtgggtgggtt

SEQ ID NO: 924 - DNA, 323 bp, Homo sapiens
aagacttcctctaaagtggaactagcccaacctcggtgtacccacctcgaagtctcttttatatgttgagtttctaattattgatgctagtaccataaaatgaggatacaattatcatggcagccatgagtgaaatttttgtagaacaggatttattaatcatctgttttactgttcaaaaatctattagctaggactttctgccatgtgtataagcctgatttgtggaataagagaagtttggaagagtcactatataggaatcttccttttaagagggcatatgtttctaatacagggattttagctgtattattttggtc

SEQ ID NO: 925 - DNA, 349 bp, Homo sapiens
catcatgtttgccaggctggtctggaactactgacctcagatgatccacctgcctctgcctcccaaagtgctgggattacaggcgtgagccattgcgcccggccttcctgaagtaactcatatctgctttgttttttattcagtgacagctacgttgaaaaaagtagttactttctgatagattccagtattcacaggatttaagcaataaaaaattagcaatattttaattgaatgctgtcattttacaaaataagacattgaggtgcacattatgggctagtttgggggaaaacgggacttaaacaaaataagaagggctggactggtcattgggaataataaaaaa

SEQ ID NO: 926 - DNA, 293 bp, Homo sapiens
  misc_feature (1)...(293): n = A,T,C or G
aaaaaaaaaaaaaaaaaaaaaaaaaaagggggcccgttttttacaaaaacccaaacttgaaaaaaaccttggaggggttggaaaaacccaaacaaaaaaggcgggaaaaaaaacccttaatttgaaaaattgggaagccaatggtttaattggaaccaataaaaaccggaaaaaaacaggtaaaaaccaccattggcttttttttaattttaaaggtcaagggggggggggggagggttttaancannnncaaccanaaaaatngaggttctcattagccgtgattttatttt

SEQ ID NO: 927 - DNA, 344 bp, Homo sapiens
attatatttttaatttactgtggatgactaacacttattagtattcttttctgctgccacgaacactgaaagcttctttctgtctgggtcttggcaaagtatgaaagtaaataattctttaaaatatacatagtcagtccaagaaaatcgggagacctcaattgagtttggagtcactgatgtacttcacatttaccttagaaaactgatctagagtatcaaagaaattaaaaataattaatttttagaatcacaatgcagtataaatcattcaaccaaactccacactctagatggccattaatttgcaagtgaagtaggtcactgggactcttaatatatag

SEQ ID NO: 928 - DNA, 346 bp, Homo sapiens
gttgcagtgagccgagatcatgtcactgcactccagcctgggcaacagagcaagacactgtctgcaaaaaaaaagaaagaaaaaaaagaaaacttgtaaaagtaacaaatgcattccactggattgctggtcattgttcaatgctcttataaaccaaagttatctacattccttaaattaacatttggatagaaactgagcaaataaaaggaattactgtcattgtcatcaatttcacattttaaaaaagaaatttgacaattactatattctctatatttttcaagaataatgaatttggagccgggcatggtggctcatgcctgtaatcccaacactttgggag

SEQ ID NO: 929 - DNA, 291 bp, Homo sapiens
  misc_feature (1)...(291): n = A,T,C or G
ccctattcggaaaaaaacccaaactggaaaaaaaccttggggggggtttgtccccccccccccaaaatggggggaaaaaattgctttttttggaaaacccccaatgaaatgggtttaaaaaaaacccttttttggggaaattagaaaggttaccccttattttggcccctttttattttgcaaaaaacaggggggggggggggtgcttttttttttttttttaggtttcgggggggggggggggagttttttnnnnnnaganncnccgngacatttctatctatactattg

SEQ ID NO: 930 - DNA, 374 bp, Homo sapiens
tacggctgctagaatacgacagaagggtgtcaatggaaacagagcgaaccagtattggtgttgggttagatgaggccctaacaagaagtgtaaaggggtaggctgtcatcatcttaaagacatttggttcttactctgtctccactgaagcttgcgaaggactgatgttggcaaaacaaatctggtcaggcaagcaaggttatatataacaattagaagaggtcaaccagggttttatttcaaaaacaaatatttactgcacacccacatcatgtcagacatggtactaaacagataaaacacataagcagacatggtccctgctcttatagagcttccaggaagcttatgaatttaatcaaagactcaagccc

SEQ ID NO: 931 - DNA, 347 bp, Homo sapiens
cggggctcactgtgaacgaaccactcatcccaagcgccgtgaagaacactgatatctgagaacctctgtgatgctctggctttatctggtccccttatcatctgaaatgcttatgttacccgctccagttgccttcatactatgtatgcagggcagggtcaacatacgcaaagtcaataaatgtaacccatcacataaacagagccaatgaccaaaaccacatgattatctccatagatgcagaaaaggcctttgataaaattcaacacaacttcatgctaaaaactctcaataaactaggtattgatggaatgcacctcaaaataataagaggtattcatgacaaa

SEQ ID NO: 932 - DNA, 351 bp, Homo sapiens
  misc_feature (1)...(351): n = A,T,C or G
cgggtgcgtctcttgttatcctctgtgaagcgagccagatccaactttgcctttgtgcttatgtgtcagtctctgctctttgatggtcacgcctatattgtgtccagactctgttttatttaatctgtgagttttctttctaaaaacatattctatattcccgttcaagagtggagctaacttcacaggatttgggaaaattctgattattctagcccatacacagaatgcccaggacaaggaagacaccacttctctgaggaattgtgccaagaatacaagtcggtgaagtcagcatgcacatgttgaatgtttacaatgtgccaggtactttcatatactattctattn

SEQ ID NO: 933 - DNA, 374 bp, Homo sapiens
  misc_feature (1)...(374): n = A,T,C or G
tacggctgttagaatacgacagaagggcttagcacaacagagaaaagctttaaacactcttacctttgactggaattacacacacacacacacacacacacatacatacacacacacacatacacacacacacactatggctttcccacaaagccatgatgcatccttaaaaataacacacagctctgaaaagtgaatgtcgggggtgaagagagccctcctacactccttttcctagtgatgacaaggttgtgggggcatggctgactgtgaggagcanaagatgagagggagatatcattttacttctttgcactgcnataataaaaagaacagatataatggaaggaagaggccaggggcagtggcttata

SEQ ID NO: 934 - DNA, 344 bp, Homo sapiens
tatattaatctagtctatcttagaacaagttaaatagtatatgtacttgtaataacttgtgcctacatatgttagttttgtctattaatttttctgttaaaaagaatatgcattgaaatgagatggaaaacaaaatgaagagtgcttaaaaaattaaatattttagaaggatcaatatcctaagggttgtgggtaattttttcctactttctaaaacttcagattcctttcactcacttaaggttgtactaccattaatgcaatgttttctgggagtgcaagatttgcaaatgaattaataacagctagaagcctcactatttgcacttttataacattctttg

SEQ ID NO: 935 - DNA, 351 bp, Homo sapiens
tagcagtagtagtagctacctcaaaggactgtagtgaggagtaaagttacatacaaagcacacagaactgcacctagctcagagtatgtataataaaagtattagctaatattactgtagtggaaaactcccttaattcaagtgattgtaccttttttactcaaatacctcctcctcaccctgcatctcctgtggctccatgaaatcaaggccctgcccagaacagtctctgtgccaagacagcttttagctcacccacaccactttatttacagataaattctgacatacagatgtgggtttcaaccttggttcctgtgtcctcaaccaaaagataagcttttcaggggg

SEQ ID NO: 936 - DNA, 345 bp, Homo sapiens
  misc_feature (1)...(345): n = A,T,C or G
ctgtcgcccaggctggagtatagttgcgccatctcagctcactgcaacctccacctcctgggttcaagcaattgtcctgcctcagcctcccaagtagctgggactataggcatgtgccaccatacctggctaattttttttatttttagtagagacaggatttcactatgttggccaggctggnntncaactcctgacctcangnnnatcctntnacccccctccctctctttttttcaccacaatttactctcaccattcccctccttttaaatatacaaaacaaaaatctcaactccccttaaccaatccatttcctttcaattaataaattgccaacaaccc

SEQ ID NO: 937 - DNA, 273 bp, Homo sapiens
agaagggtttcatatggggatgaggagatgtagtttttatcttttttctgtaagaaattggtggccttcaggttttttcttacttcttaatgtggagtggtcttatcgtggtctttttctctggtcacatatttatactttttgtgtgtgtgtgtgtgtgtgtgtgtgtgtgtgtgtgtgtgtgtgagacaagggtctctctctgttccccaggctggagcgcaggggtgtgatctcatattgtgcaacctctgactcccaggttcagagtgg

SEQ ID NO: 938 - DNA, 345 bp, Homo sapiens
actgcgcgcggcctagctggaaactttcctgcccagtatatcagtcatatttctcagcctcactagcatcaggatgtggccatgtttctggctaatgggatgtcaacggatatgttcagtgggacttcctagaagcttccttaaagggaagcagacaggccagaggaggtgcctcatgactagaatcccagcactttgggaggctgagctgggaggatcacttgaggccaggagtttgagaccagcctgggcaacatagtaagacaccatctttacaaaatataaattttttcttttttttttttggaaataaagtctcgttttgccccccaggctgaagggcag

SEQ ID NO: 939 - DNA, 325 bp, Homo sapiens
gcaacatagtgagacctcatctctacaaaaatagtaaaaattaaccagttgtgatggccagtgcctgtagtcccagcgactcaggaggctgaggtggttggattgcttgagcctggaaggtcaaggctgcagtgagccatgattgtgccactgcactgtagcctgggcgacagagtgagaccccgtctcaaaaaataaaaaaaaattgtgttttcaattcattgggagctgaactagcatgccaaatataccttagtaattgttttatcacgataattatgataataaattttgttttacagaggcaacggttcagaatattcct

SEQ ID NO: 940 - DNA, 352 bp, Homo sapiens
  misc_feature (1)...(352): n = A,T,C or G
ataatatctgagcaaaatttcataaaatcaagacacccataagtcaggggaaaagatttctctcctccattaaagaagactataaaagtactacaaaaggttttggtaaacgattccttaggaagagttctttgtttcttttcttctctttcaagtgtacaacaggatggtcagcaagtctaatcctgctgatcgtaaggcctttaatgagacatagggcagcaggtagtctagatttcaaaaggtacatactatttagggcttcatagactcagagtcaaacctagaatttgattgtctaatgtatgagtatctagggtaattcataaaaagtggacaattctcccaggan

SEQ ID NO: 941 - DNA, 349 bp, Homo sapiens
aggacaataaatgaaaactaggactctcccaggctaactaaaacataacagttagtttacagatagctacataggaattccaagaaaaactcagtttgggttgtcagagaatggtttggaggaaatcaaagggctacaatttataaatgggaaagttacaagtaaatgtagaggcaagaatcctgaaatgaacatgtgaaaatacacctagaaggaatatgttagaatgggaataaatgtggctaacatctaaaactgggctttagaactaaaggagttaagacatttttatagaattcagtcttttggtctccataaaaaatgaggccggccgggtacagtggctcac

SEQ ID NO: 942 - DNA, 347 bp, Homo sapiens
aactgacttccaagaacaaattgttaaaactttaacagaaaaaccagttaaaggcgctcatcaagagagtccttttcatttggtataaatccaaaactatgaaaataccttttgtattatgtgcatgcagaaaattaagaatttattcaatttgcagaaataaatcagtgatataatggaaacatttaaaattttatctctggaaaataatccaaaatcatctatcaaaaattataggccgggcgcagtggctcacgcctctaatcccagcactttgggaggccgaggtggatggatcacctgaggtcaggagttcgagaccagcctgaccaacgtggagaaacccc

SEQ ID NO: 943 - DNA, 345 bp, Homo sapiens
aacaatataattacattgtagtgtcttctaaatcccttattatacaataaatcttctgcttccaaatcatttttatatagtatgctattttaatgaaatacttttagagaatcaaagaacactggagctagataggactttaaagattatcgaacaaaaccattcattttaaggtatattggaaacttcatctcacaaaatcacgaaaaaccccaattcagcaagtcaagtttcagttatcctttagataccttctaatggagaaagaacctgcagcagatgacagaaattgtagaatactacctcacatctgaataagaattttaaaaatttccaagcactttt

SEQ ID NO: 944 - DNA, 352 bp, Homo sapiens
atagatgagaggtaatgtctttacatgggaacaatccaataaagtcctacaataatatagggcaataaattttggagagctttaattactgtgcaagaaaaatattctagttgaaatgaagagtctccttggcctgtttccgcacagcagagcaaaccgtcttctccattcacatttcttggagttaagagcctggcctaggctgggcgtggtggctcacacctgtaattccaacactttggggggccaaagtgggtggatcacctgaagtcaggagtttgatatatcactgggcaatacaatgaaacactgtgtctacaatatattcaagaattatccacgtgtgggtacg

SEQ ID NO: 945 - DNA, 353 bp, Homo sapiens
cgggtaactcacagggcagactaccagctctagagctcaatttatctggaggagattcaacacacctgcttctctttttccactggcatggctcttggtgcgaatttgtatttatgtaagaggtagaaagtacacatcatcaccaccagaaaaatattcgacgccctttattaaacatcacacaactttgtcaatgggaaaagctgccccaactgttttagatcttacctctcaacattgttgtcaaagtacctttccactctctggtagtgtctttgagagggtttgtctattggacttaaaactacatacacaaaggtaagataaaggttatttacacagccaatcttaga

SEQ ID NO: 946 - DNA, 347 bp, Homo sapiens
tctgagaattttctataacacaaactccttaacttcctggtgggtaatgttttctgggtgttttttctgttttctgttttttttgttgccatttcttctttagtaaaatgaaaattgcaagtagaaaagaaactaaaaatggatttagtgtgaggacaggttccttttcctggcaggattgtagaacactggtattcagttgactgtttacaatgaatatatcttctggttggtcatggccagaagagaaaatgtcattggtttgtgcccaagcaaattgattattaaaatacgttgaatatgaccccatggttgcaaacatcccttttcttagtaattcttagaga

SEQ ID NO: 947 - DNA, 345 bp, Homo sapiens
tttggtattgccgttattattgttgttaaactgactaaaatcatacatggaataatagaaatcaggcctaacatcagatagacttttccattcagttaagttattgtgtagcaaaatttattttgtcagttcactacacaatgtgacagtatatagtttctctaatagagtaacattaaagaggacatataatataaccaaaaatttgagttccagataagtttggtgtctcactagcaagatgacgttaaataactcatttaatttttttgaaatcttaattttctgttctgtaaaataaaaagcaatctgtctcttgtccaaaagactatgtaggttttttaa

SEQ ID NO: 948 - DNA, 348 bp, Homo sapiens
  misc_feature (1)...(348): n = A,T,C or G
ggaaacgtggaattttacagttacagttccattgagtcaaatcccattttatatatacataaaaattaagttctgagtgagttctagctaaatataagtgcgactgtaaacgcagccaatttttttaagcagaatatgagaacacctaagtattctcttcatagcagttcctataaagggattaaacacttatttctgtgttatggntcttattcatatatttttatagcacctttttttggaacctatatttgtgcttgaaggtgtttttgatatttggaaacagtataagccatttggagtcatgattggtgggcaagtggattcaagctaaaatactaagaccan

SEQ ID NO: 949 - DNA, 318 bp, Homo sapiens
gtcatcaacatcctcattgtcatggcaaattgtgagtttatctttgccagcgtcagatagttcatcaacttccttttagccagattgcaaaaagtcccatgactctatttccaactccaatgccatctgacatgagacaaaatcagagtagattaagatagtggtcttaactgaatgtagataaagtatgctacttgtgcaaatttttcagaaatatatgaccatatgaacatgttgctgaggccttgccaggccttgaaaggggcctgtgcaagtgaggggcacagagattaagttttattagcttctcagagattc

SEQ ID NO: 950 - DNA, 351 bp, Homo sapiens
  misc_feature (1)...(351): n = A,T,C or G
cggggagccactttgacaacgctcctgtgccatgcgtgaccatgacctgctgataaggatggacatcctgcctagtactcaacctgctgcctttactgctggtaggagtcgttctcactgcgacacctgctaattgtcatattatttagaggaagaccaattgtctcaaaagcccatctcttgctttgagtggtggttcccacgaattataggagcaggtctgatggccattccagcaacaacaatgtccttgacagcaagaaaaagagcgtgctgcaacaacagaactggaatgtttctttcatcacttttcagtgtgatcacagtcattggtgctctgtattgcatgcn

SEQ ID NO: 951 - DNA, 348 bp, Homo sapiens
tgatactgagaaacaagtaatgaagcttaaaagtgctgcttgtgctctgtgccaaaggcagcagagcacttgtctctggtctccatatacacttgacatatttaccttcagtattctgaggaagattttgattcatttcacacggaataacactcacctaccatgcttaaattaccgtacatattgtgagactttattgatcataaataagttactctcaaccttgagatctggcttcaattttctggattctcattctttctcctttatatcagaagcttcataatagacaatgggggcaaatatggtgtggagaaataatcagtttatatttagatatttttaatg

SEQ ID NO: 952 - DNA, 324 bp, Homo sapiens
ggacctgtcccctggggctgggtcctcactgcttccctgggactggctgtgtaggggttgatgtgggcagtcagagggggtagggagagaagggtttggtgtattgcacacacaccaacactcactcagacatgatccatgcacacacacacacttgagcatgatgcgcacatatataccacacaaatatacaccatgtgcacacacaccacacacacatataccatgcacacacaaacacaaagacacatcatgtacacagacactcaaacatatgccgtgcatacacatacacatcacacactcaaatatacaccatgttca

SEQ ID NO: 953 - DNA, 373 bp, Homo sapiens
cgttgctgtcggccgggatgggatgtggcgcctttttccgctcgccctcgcgccccccccgccccgcgcagctaaattccggcggaggggcgagctggcaggccggctcctcccactctgggcagcggggtcccgcgtcccctcccccactatttggcagcgtctgggggtctggggcagcttcgttcattcacccgggggagttgggtttccgggaagggtcggaagctcctccctcgcttcctggagggtaatggggtggtgcctttgactccgggggtggaaaagcgaccccacattcaaggacgccaatggcatgttgagctttcccaatctaaaccaggtgcgtggagggaagcaagtgcttactccc

SEQ ID NO: 954 - DNA, 379 bp, Homo sapiens
cgttgctgtcgaaagacttggagaagattgctcccaaagagaaaggcattactgctatgtcagtaaaagaagtccttcaaagcttagttgatgatggtatggttgactgtgagaggatcggaacttctaattattattgggcttttccaagtaaagctcttcatgcaaggaaacataagttggaggttctggaatctcagttgtctgagggaagtcaaaagcatgcaagcctacagaaaagcattgagaaagctaaaattggccgatgtgaaacggaagagcgaaccaggctagcaaaagagctttcttcacttcgagaccaaagggaacagctaaaggcagaagtagaaaaatacaaagactgtgatccgcaagttgg

SEQ ID NO: 955 - DNA, 347 bp, Homo sapiens
ggtcggcgacgcatcgcgcgatggcgcgggcgggacagtgcttgtgaaactgaacacaacaaaagtatggatatgggaaaccaacatccttctattagtaggcttcaggaaatccaaaaggaagtaaaaagtgtagaacagcaagttatcggcttcagtggtctttcagatgacaagaattacaagaaactggagaggattctaacaaaacagctttttgaaatagactctgtagatactgaaggaaaaggagatattcagcaagctaggaagcgggcagcacaggagacagaacgtcttctcaaagagttggagcagaatgcaaaccacccacaccggattgaaat

SEQ ID NO: 956 - DNA, 337 bp, Homo sapiens
  misc_feature (1)...(337): n = A,T,C or G
cctgcctttttataaaatatgacaaattggccatttgtaggacatttcttcggtttctaacaaactaacagaaaaattaatcttgactgcaatagtaaattcctcttataatttagtgccaagaaaaagaaacttttcagaaaacgtgaaaaccacctctgcttcctgggttcaagtgattctcctgcttcagcctcccaagtagctgggattacaggcacgtgccaccacgcccagctaatttttgtatttttagaagaggacgggtttnaccatgttggccaggctgggttcgaattgctgacctcaagtgatccacccgcctcggcctcccaaa

SEQ ID NO: 957 - DNA, 339 bp, Homo sapiens
  misc_feature (1)...(339): n = A,T,C or G
ggaaagctgacatcagttgtttccttactctatttcaagctttttttttttttaacacaattaacgggggccatggaaccctggccagggcccttggaggccgagggtcttcagtggaaaccgagaaaactaaggtttgcaggcaggcgggggcctttccgaaggcccgggttggttttgccaaccaaatggggtttcaaaagaattgggggggaaggaaagaaaacataggccttggaccccaaatcaaacaaaccgccaaatggaaaaaggtttgggggccccccagacccttaaaaaccaattcaaaaggttctaacatggaattttaataacaan

SEQ ID NO: 958 - DNA, 206 bp, Homo sapiens
cccagggaccacagtttggatatgcttggcatagttgctaaaaatgtattgagtgatacagttagcatttgtgcgctttatctagccaggctctctagcttttgtttttgaaacacgtatgcagtggtttgtaacacacattgggatttttcaaggacaatttttaaaaattactgtttgttggacaggcgcggtggctcatgcct

SEQ ID NO: 959 - DNA, 338 bp, Homo sapiens
  misc_feature (1)...(338): n = A,T,C or G
gctgggcaggggtaaagtaaggtaaaatagagatcaggcctgcagaatccctgcgaagacaaaaccacttagtgaactcaacctttcttgatttgcaaacctaaggaaaacttaacttgagctaactcttacaaatgcctgtattacagaaaaacagagcttaagctcaaccaatcagaggtagccaacaaactttcataattaggaaccttcataggagatcaatcaaataaggcaattgtgtaattatatccaatcaaatgtttgctttgctttacctctgtttctgtcttataaaggcctccccatagattcccttggtggagttcctgaaccan

SEQ ID NO: 960 - DNA, 343 bp, Homo sapiens
tctccaatgaaggtacttttgctaaggtgtgtgaagatacctgttgctgggatcaggagacatgaaaaaactaagaaaaaaaatactgagaaaagttttcaatagctttgtaagccttcagaatgtaaagtacattaagaaataaaaacttaaatgcagtgggtacaaacatggcaaatctgaaagctaaacctgactaaggctatcaacctgccatgtgctaaaaacaaatgtactcactcagaaaaactgaaagaggtactacatacctattaaaacagctaaatttaaacagtgataatactaaatgccgacaagtatgcaaagaaactggacttctcat

SEQ ID NO: 961 - DNA, 341 bp, Homo sapiens
tgcatccggaaggtggaggttgcagtgagctgaaatcacaccattgcactccagcctgggtgacagagtgagactctatctaacaaaaaaaagaaaagaaaaagaaaatttcttttcctagtttattggaaattattttattaaaaggggatggagaattaattgtatcatcaaaaaaatatcttttaaaaaaaaaggtatcacaggagccatccatctcaaaaaagcagggaaaaaaaatatgagactttcaatattaaaaatgaccaaatattaagattggcttctctctctttcttttcattaactgacgctaaccattagaggagaggtgactctag

SEQ ID NO: 962 - DNA, 202 bp, Homo sapiens
ttagatgatggatatctagaggtgtattatatcattggctctattttgtatgtttgaagtttccatagtataaaacttaggaaagttaatttaaacagacaaataccccatcatgaaaatggataatcaaaaggaactcttgataatgaaagaactaaaagtggccagatgttttcaaatgcttagctttactactaattct

SEQ ID NO: 963 - DNA, 339 bp, Homo sapiens
cctggatgacagagcaagactctgtctcaaaaaaaaaaaaaaatttttttttagcccctttgtggtgaaccttcaaaccccctaaaaaaaagagaagatttttttgttggttggtttctgaaacagagcctaactttgccgttcaggctgaaggactttgaacacttctggttttttttaaactgttaccaccaggtgtctacaactgctgaccccactgtggtttaaattctattcaaaacagacatcggaggctctgaggctgatctcatgtgccccgtgagaacatttggaatttgaggaagaggagactggccttggtatgccttgccatcacct

SEQ ID NO: 964 - DNA, 342 bp, Homo sapiens
acatggtacctaagatactagaatacatttataaatatttgttgaggaactaattataaagactattccaggtgctttagggttcagccacaacctattataagtaatacctattataagtgggtgcttgtaatagatattaccatattatctaagcactcactttaatactcattgttctgggctccacctgatgttatgatatgaatctttttagctatactctgatccagaagatcacatgattagcatcaatttctaaggacagtaataaacttgatagttctgagcaaatacatacactacagaataggcattcaacaaatatttattggctgccta

SEQ ID NO: 965 - DNA, 309 bp, Homo sapiens
gtgggagctgagggcagggatcaggcctggagggaagcaggcccagaggtgggcaccaaggaggagatggagggagctttgtcccatttctctctgagtcttggccccatcttggaaacctggccccagactgccattcttgaatatgtgataattactgctataattggtggagcccctgcaaggggcttcatactttgcctcacttaactttcacaactactagaagagcgaggccctcttatctctgctttcagattaaggaagggagatgcagggtgatgaaatcacttgtccaggctgggggca

SEQ ID NO: 966 - DNA, 336 bp, Homo sapiens
  misc_feature (1)...(336): n = A,T,C or G
tttgtatttttaatagagataggttttcgccatgttggtcaggctggtctcgaacccctgaccttgtgatctgcctgcctcggcctcccaacagagcagtcctgatgagccctccccgtaagaaactgctgaaatgttggggcggctgtatgtttttgttataaggaaaaggtaacatttgtggaaggcagtacttcacagtgatacatttaatggttgcatattcaaatctcaaatgagattactagtaatctagagcaggtgtttcttatcccagaaagttcttaaagttctcagaattagttctcttgagacaagagccatattttcctgtan

SEQ ID NO: 967 - DNA, 339 bp, Homo sapiens
ttttgcagtatgtgcatgcattttctattcacaaaaatgaaattttttaaaaaagggggcagtacttagcacaatgcctagcagtggtggcggtggtggtgatagcctttctgcagctctgggcagatgattcactgcagaaatgcagcccagagatatctagaggctggccatagcctccagactgtcctcctagcctctcggtctcccttcttcattctatatgatccatgtttccccatcggagaatctttgcattttagagatgtaaaggggcttcagattttctagtgcaactgttttaacggtgaagaaactaagcccccaaaagatgccatt

SEQ ID NO: 968 - DNA, 340 bp, Homo sapiens
ggacactggaccaaatgtctgatcagctcatcacattgtccacatgaaatggaccgtcttcctcagttcaaaataatcaaatgatagatggagaattctgaaagttaggagctacaactatttgaaataaaactctagttacatatttgaaccgttcaaggtaggttgtttaaaagcagtttgttcacaaacaggtatatacacagtagagtaaatttgttattttagcaaacgcttatttagctcatgctgatttaatgagggttcctttcatgatacttaatagttataagaacattttttacgattttatagttaaacatttcttttgcataccttg

SEQ ID NO: 969 - DNA, 337 bp, Homo sapiens
cgattctcctgcctcagcctcccaagtagctgggactatttttgtatttttgtatttttctaattttgtatttttagtagagatgggggttcaccatgttggccaggctgttctcaaactcctgacctcaggtgatccacccatctcgacctcccaaagtgttgggcttataggtgtgagccactgcacccgaccgcctccatcattttatattaccttcagcaacgtgtgggggatgccctgtttgcacttgcttatcaacactagatacttgcttattttattaacgctatatgagagggtcaggtggaccggcatttttacccgcctaagatcc

SEQ ID NO: 970 - DNA, 338 bp, Homo sapiens
  misc_feature (1)...(338): n = A,T,C or G
tgaccttttgatcccatcatgggactgttccccagccctaggccactggaatggggggaaatagaaccctcctttccttgttcccactcttgtttcttttgaacatgggttacctcccttcgcgtcttttggaacagaaggggatcataagctcttgagtctctgttttctgctgtcatctactcttcctgcctctggcacctcccagctcctgacttcctcctgcttccccctggagccagagacgtggctgggaagagcccctggcctttgaagccagtggtggtggtgaccaggggcaacaggccactgtgctcctggatgcgtggtctgccagn

SEQ ID NO: 971 - DNA, 340 bp, Homo sapiens
gaataaatcaacatcagagttttataaatcagagtgtctttgtactctacaaattagtatgcttaatatacaacttgaagtccttcagagaaaatattaaacagaaatgccttctacccagagatatgaatgtgcctttgcaataataaagaagagactaaaaattgtatagcaatacctagtatctgaccaatacattatttcacaaaaataataaagtatcttgcatcatacatggaagacagtgacttattcctgaatctactatatctacagactttcttgtaccaaatatttactataagtacatacaactatggaaaatgctatgctatgcctt

SEQ ID NO: 972 - DNA, 341 bp, Homo sapiens
atttaccgataggtgtgggagggcaaccaacattttattctatacccttttatgctttttgttgtttgaactatgtccaggtgttatatctattaaaatagtatgaattcaatggcttactctaaggaagaccatgatcaccagcatatgagaggcagacgaaacgctatccacagcaagatgaacacctacacagcagggagaacatgggaggattcaaggtggtaagaaaatttaatacaagtctaggcctggtgtggcggctcacgcctgtaatcccagcactttgggaggctggggcgggtaggtgacctgaggtcaggagccaagaccagcctggc

SEQ ID NO: 973 - DNA, 342 bp, Homo sapiens
ttttcttgatgtctcataacttctcctttctcttcccacattccgaaaatcctcctatcctaaccttgctacatgaatggtaactgcttgaacacttgtgattggaatgactgatttaaaaagcccagttttgaggtagggcgcagtggctcacgcctataatcccagcactttgggaggccaaggcgggcagaacacgaggtcaggagatcgagaccaacctggctaacatggtgaaaccccgtctctactaaaaatacaaaaaattaacctggcgtggtggcgggcgcctgtagtcccagctacttgggaggctgaggtgggagaatggcgtgaacccag

SEQ ID NO: 974 - DNA, 339 bp, Homo sapiens
  misc_feature (1)...(339): n = A,T,C or G
actaagcacaattagaaatgtcttggtttatatatttcttcccatgctttctgtctctacaaccagaatataagcttcagaacaagagtattcaaatctggtgtgtttatccccagactcacaacactgggtccagagcaggtcctcagtagatgtttataaatatcaggatgtattacatatattaactttttatgagtagttattatttattatattccacttagatatggaattattacttcaggtggtagctgacttgtactggaaaagtgactgagcccaactctaatgctaatgttaattggatttatatgaagtttctttggtttaattgcn

SEQ ID NO: 975 - DNA, 341 bp, Homo sapiens
cctatcacacccattcataaagatcttgcgtaggtgatttgggtttaccatttttgtctaaacttttcctcatgtgagttctggataatggactccgatttttttaaaaatggtaaaactaattgaacatatcagtcatttgtagttggagaaaaaattgacttgctttctatatgttaagtctagaccattttgccctctttgtaaaatgtgatttgtttttgtatatgtttagtaattttatgagctatttataacttactgggaatgatcagagaacagggttcttttttttttttttaaaaggtttttggcctggcgcacaagtctcacaccttaat

SEQ ID NO: 976 - DNA, 310 bp, Homo sapiens
tgcacatcatttctaggaagacagttgtctatgtatggtgatttcactgctcaccattatagaaatgaaactaactgcagaaggtagacagcctaaatgggagtagctctgccaagtgtgtgagcttttaaaaaaatgtatacaatttttttggcttttctaattcatactaatgattctaaattacaaagagaagccattctgcttcagattttggaaatgagtctaatgttaactaaaaacctgtgacctgatgaggattttgataactcctctaccatatttgtttacctggctctatttcgaataa

SEQ ID NO: 977 - DNA, 342 bp, Homo sapiens
tacaacaaagcaataatgccaggctagtctcatgccctgtgaactaattacagaggttgccaacctcaatgaaccacagtgaacaactttagatccacagagagtctcaacttataaaattcattaaatagaaatagattcagaacttttcacttttcagtttggcagtacgtgttgatacagattaggaaatgtttcattttatggccctatataaaattaagtgtttttttcaactttattgaggtatcggtcacatactatacaattcaccctttaaaaatatataattcagggccgggtgcagaggctcatgcctgtaatcccaggactttgggaggg

SEQ ID NO: 978 - DNA, 339 bp, Homo sapiens
caaatcctggatagtttaatctcttcaaagaggaaacatgtggttttctgctagggcatagaaggagatcaggggcttagctgtttcttttaaagactttgaaccaattctcctactttcagttttatgccttactattttcttaaagatacctgatacctgcaattcttgggcatttgcatattgctgtttgatgcctcctgtccccaaacagcacttagctttttgtgtttattttttaggtcaattgcctcttactgatttgttttccagttcctaaaacttgctgtattatgggagagagttgagataaatgcaaatactcagaagtattttgtg

SEQ ID NO: 979 - DNA, 231 bp, Homo sapiens
tcattcagcgtagagcatgtggaacacagtggcttcctagctaatgtttgctgaatggaatagaattttgaatacaatgagccaaatttctttactattagaggattttgctgaatggttaaaatcaatgcaaaatgaggaatcaaagtttttgattaggtattacacatgaaaccaggaagagggagaagtacctcctttaatgtgcatacagagaaggtaacccatgag

SEQ ID NO: 980 - DNA, 341 bp, Homo sapiens
agtatctacataaatcatttggaattcttctaaacagacttgtctgtcctctgccatttatttatgtggaattattattattattattatcattattattcagaggtagatatattcttgaaggaattattatttaaaaaatcacagcatcccaatactttgtttcccaaagaaatagatatgttcacattatgagtaaagactgtttttgaacttgctctaaaaaatatctggtttctacattgcagagctgagatttgtgaagaatgaggcagaattaaagttttggggttgagtgctttttaaaaattgggtatttattttacttatttatttttgag

SEQ ID NO: 981 - DNA, 337 bp, Homo sapiens
tctgagaattttctataacacaaactccttaacttcctggtgggtaatgttttctgggtgttttttctgttttctgttttttttgttggcatttcttctttagtaaaatgaaaattgcaagtagaaaagaaactaaaaatggatttagtgtgaggacaggttccttttcctggcaggattgtagaacactggtattcagttgactgtttacaatgaatatatcttctggttggtcatggccagaagagaaaatgtcattggtttgtgcccaagcaaattgattattaaaatacgttgaatatgaccccatggttgcaaacatcccttttcttagtaa

SEQ ID NO: 982 - DNA, 339 bp, Homo sapiens
tttgcctgaaattgcacgtcagcttcatttcctcaccccctccccaatcattcttaaacaccttcgaactgaaaattttaattctgattagtttatcttaacaaacaatttagagaaggattggtgtccaaataaactgtatgatgtggaacttgccccaaatgaagaggaagttggcattccatagctagacagtagcatttccagctgtgggggtgccagagctgagccaagcaggcctgctcagcagagacttgggattcaggctttgtaagaactcgtgttggcaacccgttccctgtgttgcaggcataaacccaagagggttttaaagatcaa

SEQ ID NO: 983 - DNA, 339 bp, Homo sapiens
gtttcaccatgttggccaggctggtcttgaactcctgacctcaggtgatccacctgcctgggcctcccaaagtgctgggattacaggcgtaagccaccgcgcccagccaagtaaaattaaatattcttgtattctttttatatctctggaaaagtattaaatacattcttccagaaaaaccttcgctgaagggcttggctggactagtttcccacagcttatccctaggcctctgggtagaattggttttctttaatggggggatagatcaaacatcatacggagaccaacaaggttttttggttcttcttaaaagccactgggaatcttcagaacaag

SEQ ID NO: 984 - DNA, 342 bp, Homo sapiens
ctgttttgtcctcattaacctgtaatgcttgactttcatatttctttactgccatatgatatagcagaatagagttattgatttcaatggtgcacaatattttgattactaaaaaataccattttcccctgatgaattgactgatgttttaaaaatccatccaacaagtaactgttgaatcctataatatacaatgctttgttaaggcaaatggtgaatgcaaaatagtgaacactataatctctggaaaccaaataaaaagacttcgggtctcagaagtatacagcaactacatattttaccaccaaccacatgcccaaccaatggtatatacaaattaac

SEQ ID NO: 985 - DNA, 340 bp, Homo sapiens
gtctcacaatgtcaccatctacaatgcatgccagctgtaaacaatcacttgcaattccacaaacgtaccatgcttttctcatctcccatcttaacaataacagttctaacatataatactggttacagtgtgcctggtactatgctaagcatattacgtgatgatctcatataatcgtcacagcaatcctgtttccttttcctggaatgacctgccccacctattaattctctcactccccacacacatttagccagcaaactcctattgagctaacagccatcatccatcccaccacttattccaagcaccctttcctgcctcccactgccacccttct

SEQ ID NO: 986 - DNA, 337 bp, Homo sapiens
ggaaaatggacgacacacctatctctgaaaacaacatggaagaaacagggtctttggattctttttctattaacagcccactgaatattacaggatcaaattcatcttatgaatgtacaattgaaaattcactgctgaagcaaacatggacagggcgctggacgatgaaagatggccttcataaaatgcaaagtgaacacgtttcactctcatgtcaacctgtaaatgattatttttcaccaaaccaagacttcaaagttacttggtccagaatgaaaagcgggactttctctgtcccggcttactatctgagctcctcacaaaatacaattatcaa

SEQ ID NO: 987 - DNA, 311 bp, Homo sapiens
gttcttatgaaccttgaaggttgttgtaaaccgtccaaatttcagaaaaataccgattatttctgaatagaaatccaaatatagatgcttacggttagattgagcctggattgccctcaattaagaacaattgagtttttttgttgctcgttcattttacatgtcgtattggtacatggtacatgtactagtggttttccaaagtccatgattttagtatcttatataagaaattaattgtcagccgggcgcagaggctcacgcctgtaatcccagcactttgagaggccgagacaggcggatcacaaggg

SEQ ID NO: 988 - DNA, 341 bp, Homo sapiens
aaggtagagaatgctattcagttagtcagtttaacatacgagattgtcaactcaatagctcagaggggccagaaatacagatttgctggcttctggcttgggtggtagttgaagtgcatgggagagggtgagtttgcccaatcaggccgcgtacagtgagaagggaagaaggctaaagatgcaggcctaaggaaaatcagcacttaagtaggaggaggaacagccaataagagatcaaaggggaaagttttattttatgttggatttttccccccttaagatgagctaggacaggtgtgggggcacatgcctgtaatcccagcactttgggaggctgcggt

SEQ ID NO: 989 - DNA, 370 bp, Homo sapiens
actacgattcctacataacaacaaacggagccgggtggggacgcaccacaaatacactgcgatgaccctacagctgaattcgtgaagcctgggatgctaccgctataccttacaccatgataaaccgcagaacacggctgacctgctacacccgccttcatagcacactctaggtccaaatacaggagtgataggttcacactggctagccccagagtgccacccgagggcaggcctggctgcccacaaagaagaggtagatttggggggctgtgtggagccagcatgaggcaaggcatagccaggaccagaggcccagggaggccacagctgacttgctgggtgctgcagggctgttggaggctcccac

SEQ ID NO: 990 - DNA, 337 bp, Homo sapiens
atgtcaagctcagttgaacagaaaaaagggcctacaagacagcgcaaatgtggcttttgtaagtcaaatagagacaaggaatgtggacagttactaatatctgaaaaccagaaggtggcagcgcaccataagtgcatgctcttttcatctgctttggtatcatcacactctgataatgaaagtcttggtggattttctattgaagatgtccaaaaggaaattaaaagaggcacgaagctgatgtgttctttgtgccattgtcctggagcaacaattggttgtgatgtgaaaacatgtcacaggacataccactaccactgtgcattgcatgataaag

SEQ ID NO: 991 - DNA, 343 bp, Homo sapiens
  misc_feature (1)...(343): n = A,T,C or G
gaagtcgtggaagcgtcggcgacgcatcgcgcgatggcgcgggcgggacagtgcttgtgaaactgaacacaacaaaagtatggatatgggaaaccaacatccttctattagtaggcttcaggaaatccaaaaggaagtaaaaagtgtagaacagcaagttatcggcttcagtggtctgtcagatgacaagaattacaagaaactggagaggattctaacaaaacagctttttgaaatagactctgtagatactgaaggaaaaggagatattcagcaagctaggaagcgggcagcacaggagacagaacgtcttctcaaagagttggagcagaatgcaaaccan

SEQ ID NO: 992 - DNA, 332 bp, Homo sapiens
aaacattcatcaatttggcccagacaaaagtattcttgcttgctttaggatttactcaacttgttctaattttaaccttctgttgctttaaaatatggtaatggatttgttggttgttgaaggaattgaatgtgattgtggtgttacatcttttcttatattaaaatctttaattctaaaatcagtatgtcacatacattaccacattaacacatcaagactggaaactgatgattggaacagagacaaatgtgttggtgagttgtggtgagctgtcaagggacttatggactatagctgtcctatagtctataacgagccagctgaagatg

SEQ ID NO: 993 - DNA, 332 bp, Homo sapiens
taaatgggatacacgtcttcttaagtaattcaaagtctagtaggggaagcagaaaggtaacaaacaattaagatacaaaagtaaaacaaaagccctctgtagagtgctccaacatcttttattccttatcatctccccaaattccaatttgctgcccctatatgccctttaaaaaaacccaggccgggcacaacggctcacacctgtaatcccagcactttgggaggctgaggcaggaggatcacttgaggccaagagttggagaccagcctggctaacacggtgaaacttcgtctctactaaaaatacaaaaattagctgggcgtggtggt

SEQ ID NO: 994 - DNA, 327 bp, Homo sapiens
  misc_feature (1)...(327): n = A,T,C or G
gtagacagtccaaagcagcatcagacacatcatgagtgctcaaactgtacatctgcttccctggtgatttttctttcaatggccaaaggatagaggcagcggcaattccaggtgtgctgtgagccaactgtgtgagcctgggcgcctacttaacctccctgagtcctcttctataagtgagcattctaatagtacctagttcacaagttgtcctgaagcttaaacaaaatagcaaaatgatgctttttaaaatgacaatacaatcaagaggacagaacaggtaaagactttgtttattcacaaattgctggtattgattgaattggn

SEQ ID NO: 995 - DNA, 335 bp, Homo sapiens
tgctgatgcggtggtactacagaaagagacgcctgacttacatattccactcgtaactgcatctgtaagaactcaaatcacctttgacattaatttacgaccaactgcatgccctacataattgagacacttgggatcgggtggaaaaagacaccaaattgtctcatattatgaatgaacactgaagggggagtttggggaaaaccgaatataagcaactcattcaaggagacaaattcagatgatagtttcgagaatataaatggagagatgtgattcacaataatattggggatgctatcttagatggcccgcttaagaaaaacctctcaaaa

SEQ ID NO: 996 - DNA, 332 bp, Homo sapiens
ctatcttagaacaagttaaatagtatatgtacttgtaataacttgtgactagatatgttagttttgtctattaatttttctgttaaaaagaatatgcattgaaatgagatggaaaacaaaatgaaaagtgtttaaaaaattaaatattttagaaggatcaatatcctaagggttgtgggtaattttttcctactttctaaaacttcagattcctttcactcacttaaggttgtactaccattaatgcaatgttttctgggagtgcgagatttgctaatgaattaataacagctagaagcctcactatttgcacttttataacattctttgct

SEQ ID NO: 997 - DNA, 334 bp, Homo sapiens
gggactcttgctaaaggcaagccagggacttagacttataaagcatcaccttatcaaaggtggaggatgatcaacttgatatcaagggtgaccagatttcagggaagagggattctcactaaactgactcccagaggtctcttttagcaaggcactcatgccaggcgcagtggctcatgcctgtaatcccaacactttgggaggctaaggcaggtggatcgtctgaggtctggagttcgagaccggcctggacaacatagtgaaacccagtctctactaaaaaaaaaaaaaaattggccgtcacaatggctcaggcctataatcccagcacttt

SEQ ID NO: 998 - DNA, 327 bp, Homo sapiens
atactactttttgtgcgtgtgtgtatgtgagacagagtctcagtctgtctcccaggctggagtatagtggcacgatctcggctcactgcaacctctgccttctgggttcaagcaattctcctgcctcagcctcccgtgtagctgggactgcaggtgtgtgcctccatgcccagctaaattttttttgaagatttagagaacaccctgtttcaccttggtgaggaggctgagttttaactattacaccccattcgcactgagtgggtttccctcctttaatcccgcggtttggtgctatcttttattcgagattttttattacacacc

SEQ ID NO: 999 - DNA, 331 bp, Homo sapiens
cttctcttatatttcaactgagactatactgtaagaaacaaaaatgatctgaaccatatttgccatgtaacattaacaatgtgagaaaattattttttaaaactgttgtcaattaagacataacttatatttttctcattggaatttcccaacatggctgtcctggttaggacagccaaaccaagccaaagagcagctccctatgtctgggcatgcagtcatctgacttcaatagactcttcacctcgacatgtcatgtactctaagaatgtaaaagtttttagtgctccagcaatgctaaggccaaatccagcacaactagcatcacagt

SEQ ID NO: 1000 - DNA, 334 bp, Homo sapiens
cgtccttaaagcttaaggcgctcctcccccagcagcctggcttgagggagaggcctgcctctgttgtgctcgctgtggtgggtggtaggcaccctaggtccttaagggacatacgctccagcccttaacctttcctcagcctctgagttcttccggccctgtcctgtctctgtggcacccgtcctgctaataatgccttctccattctgcccagaacaagacaccatgccgggtgcggtggctcacacctgtaatcccagcactttggggggccaaggcaggctggatcacctgaggtcaagagttctagaccagcctggccaacgtggtgaaa

SEQ ID NO: 1001 - DNA, 329 bp, Homo sapiens
acgcacacacacacacgcaaacactctctctctaacaaatgtctctgctctatacagctggactgactccgctctacatagctggactgactctgctctacatagctggactgacattatctgctaatacacattcaccttttctgtttttatactcatcagctcttcacacctatagaaatgcagtgatgatgataaaaatgaccattaaaatatcacagacaatattacaaattatatcacaaagttattttcttaataaataaagacaaattaataagaccaatggctcattagaaaaatgaacacaggaaatgaacaagcaattg

SEQ ID NO: 1002 - DNA, 329 bp, Homo sapiens
  misc_feature (1)...(329): n = A,T,C or G
gctgggagcgctgttcaaggtaaagagtggttagtaaaatgatctcctttaagttgctaagagtaagatgccaagtaacagaaaaatgaaactctcatgctagcaagtgtgtatgtgtgttggcgtgtgtgtgtgtgtgtgtgtgagtgtgnnncantanaacctgtagtgaacttttttattaacaggaattgccgctcatggtatgttctctccttcaccgtgaggagtttcacgatattccattctctgcgatccggtggaattctactaaaaaaatggttcttctcccctgggggggaattttttctgtgaaacaatctcccccg

SEQ ID NO: 1003 - DNA, 335 bp, Homo sapiens
ctcaacacacccaggtttttttgttctctctttctctctggcctcaattccatgccttactacttgattgttgtatgctaggattgagggaatatgcatgcaaatactagacaaagcacttgagggaggccttctcccacagtactggtggctgtgtaatagatgttctcaattaccaagtgcttaaactgagccctatgtacttaggcagcctgtttagagttcttacccacttgccaatgacacttgactgctgaatccaaatatgaaaaaaactatagatagattcaaggaccaaaattatggatatgccactgaaaatgtatggtagagta

SEQ ID NO: 1004 - DNA, 326 bp, Homo sapiens
aactttaaacaaacaaaaacccactaatgtaccaatttgtgattctgggcaaagtttttgaaaagtaagttatgaaacaccttttacctcattgtattccttttaataatcaagcaaataagtaaagtgataatgaaaaaataatgatatgtacttaattttatccttttgtatctttttttttttttttaaaaaaagggtctaattttgccccccgggtgggggggcagggccttggggttaacaaaaccttgaacttctaaaaaaagggaaccttccattttaaccctctgaagaggggggacttttaaacccccccccccccc

SEQ ID NO: 1005 - DNA, 334 bp, Homo sapiens
  misc_feature (1)...(334): n = A,T,C or G
gcagtggcatgatcttggttcactgcaacctccacctccctagttcaagtgctcctcagcctccagagtagctgggactacaagcaaatgccaccatgcccagctaatttttgtattttttatagagacagggttttgccatgctacccaggctggtctcagattcctgggctcaagtgaactgtccacctcagcctcccaaagtagactattcttatattttcctttcattggggagtaaaacaaaaattgtttcatatgaatacattttcacaggaggaagaaacaaatttcattcttaactgaaacttacaatggccagaaattaagccan

SEQ ID NO: 1006 - DNA, 329 bp, Homo sapiens
ttgatctgcagtgggacctggaattttatacattgagcatagtgccaggcaatgcttatgatcagatgatactaattaacccctggcatcatatgatcttcactgtgattggagttagaagatttagcttcatatcctgccttctcctatcaacacacacacatacacatatacacacacacgtgcacaggcatgccaaattggctgttacttatctcacttgtattatttatatctttttactcataaaaagactttgggctgggtgtggtggctcatgcctgtaatcccagcactttgggaggctgaagcgggtggatcatgaagtc

SEQ ID NO: 1007 - DNA, 300 bp, Homo sapiens
  misc_feature (1)...(300): n = A,T,C or G
tcttcagcagtttatatacaacaaatgccccccggttacctcttttctgggagagcctcttgtttcaattgaaagttctcatttacagcaatctcatgagcaagagtcaagtttgataagttccttgctgtagccatcacttcatcaaatgttacaacccttggagggcttgttgctgaaagaaaaacaaaagccagttaatgttgcagaagaaaagttgtcatccaacgaagcctcctgatgcagataaggtttaatttatcagaatgtatatacttcagagntttataggtcaggaga

SEQ ID NO: 1008 - DNA, 331 bp, Homo sapiens
agtaattacattagcaggtttagttgtcatgaatgagtttgggaacaatcactgatgactcttggtaagcccctctgtgggaaagaagtatctccctgggtatccaacttgcagggagtgttcaggatctcatgttctgtagaggtcataaagagggccagctaatctgggctgtcatgtagacacagctcagtggagagttttctggcaaaaggaggagcaaaggccctggggcagagaaaatcttggagagtacggaaaggccatgagactgaagtgtaataaatgaggcatgaggagtgtgtgcgaagacaggacgcaaagagagatg

SEQ ID NO: 1009 - DNA, 330 bp, Homo sapiens
gttttttcttatttgtaggtttaagtgtctgttttccaggcaccctcttccctaacccgttacaagaatcatgtctcgtgtgatcttatatccccagtactgagtgttcgtatggctgggacttaataaagtttaaatgaactcatgaataaatgtgttgcacaaccaatgagtgagtgagtgaacaagtgagtcaataagcaagaatttagggacatgggaaccaccacttataagcttgaggctgttgtgcaaatttggaccttcatataagccatttccttctatatagaatgctctttcttttgcttacccttaacctcttaccag

SEQ ID NO: 1010 - DNA, 335 bp, Homo sapiens
ggtagaggccagtgataggctaaatatcctacaaggcacaggctgctttccacctcctaatctctctctctctctctctctctctctcacacacacacacacacacacacacacacacacacacacgcacgcacatcccaaagaaacaaagagagatcccatcccaaatgacaaaaggtgtgagaataaaaatcctactgcaaccctgtatgacaaactgctaaggggtttgtgcaattaaaatataccctaagtgtcacagagtatactcaatcaaagtggaatattttatttatatcacccgcgctgtagagaatattcgcacagaactttat

SEQ ID NO: 1011 - DNA, 249 bp, Homo sapiens
cttatcaacttagtcaatggcaataatcataaagtaaacattaaggaaaatattttaattacaatactaccaatattatatacaccaaatttccttagcaacagtggttacagaagtaaacaatcacgagcaaaagcaaaatttacggctattgaaatcattaacaagggccgagcacggtagctcatgcctgtaatcccagcactttgggaggctgaggcaggcagatcacgaggtcaagagatcaag

SEQ ID NO: 1012 - DNA, 281 bp, Homo sapiens
ggcggagtcacccacagtggggcagcccctgcacaggctttgctggagtctccactgcactggcctaggtccaagcagtcatagcactgcccccagctgcccttctaagccctgtagcctagtggattagaacctggcctccctctggagaaaggcccaggacccgattcagcggcatcattccctagtgcttcgaccctgacctctctgagatggggtctatgcctcggggatgagtgctccctgcactggggggctgtgaccaccagcctgtggcccag

SEQ ID NO: 1013 - DNA, 330 bp, Homo sapiens
cttctataatgcttcttttatatttccttacagttaatgtccattttctttctccctctctacatgcacacacaaacacacccactcacacccacacccatgcataaatacacacacacacacgcacacacacacacacaccatccagcctgtagatatttatgcttcattttcagtaaacatgcagaagcacttttgacagacattttcctttaaatttaaattccaaagaactctgtagaaagcagtgaatggtaactgaaaagctgagtgaaatgttttatattgctaaaacttttgacattgattacataatgtcagagaatcctt

SEQ ID NO: 1014 - DNA, 327 bp, Homo sapiens
gtgtgtgtgcgtgtgtgtcacatgtgcgtgcacacacatatactatgtttgttgtatttttttctggttaactgagactaaacttgaaatttaaagctggccttccatgaaaattatttaatgatgcaatgcaaagacaaattgctttctacatcaattttctatgcaagtacctataaatgttagataactaaattatcccagagtttcttcaggaaatatcagccttttattcaagtatatgattttctataaagtattgctattataatcttttaatgctaggtgaatccacatcaagcattcaatatttgttggatgatacaa

SEQ ID NO: 1015 - DNA, 293 bp, Homo sapiens
cgacagaagggtatctttattaacaattgacttgaatttaaaaaaaattttagtatttttatttttaattttaatgaaggaaaaagtaaacatgtaaatgcttgctttatttttcaattttataaaagcagttaattacagagaagtgctgacatttctacttttcataggaaacttggagagaagtcaaaggtgtaaaaaggacaaattttagaaaatgagattcatgaggaaagactgattaagttcactttagttaatgaaatgtggaattatgaaaaattaaatattac

SEQ ID NO: 1016 - DNA, 328 bp, Homo sapiens
gttcctaaagtactagagggagacacaagccaagaacctggcacatatctcacatcccccagagatttaattcatcagttaaggctacactcctatggaccccaccctcctatgcatcaagggctggaatcactcactgaaaaaaagctttgttggctggacacggtggcccatgcctgtaatcccagcactttaggatgccaaggcgggttgaggccaggagttcaagaacagcctagccaacgtggtgaaaccccatctctattaaaaatacaaaaattagccacacatggtggcatgcatctgtggtcctaactacttcggaggc

SEQ ID NO: 1017 - DNA, 359 bp, Homo sapiens
tacggcgcgagaagaccacagaagggtgggcatatttactcatcatattcaaagtcctggggattcaggtggaaaattaaggccatttttaaaattctgcttaccacatctctggatgtgtatttttcactgcgcgttgcagtcaaaaagcttaaagagcatctagccactggactagaaaactttaaggacacttccagtcctaaaattctaaaaatctaacatgtaaagctatttttttaattggaaaggaaaaacaattatgcaaatttcaaagttagttaaatcaaaaagggtgctgaagatcttcttttcctaggttaaaataaaaaggacatgttttaacaaaagtgtcattt

SEQ ID NO: 1018 - DNA, 329 bp, Homo sapiens
ggatgggttttttttaaagggtttctcaatccatttgtcatctaaagatgcaacaagagaaagatattttcttcaatgaaaagttatcttcatctttaaatcttttaacgctaacattaacacacaagaccctcattaaatgctcatctccacatgcaaggtacttgaaaaatcattttgagaattagccatatcagagttgactgagagatataaaaaacaagaaatacaaaagacacaacatgaaaaacaaaacagaacacatcaacatatttgtacaagacatgcctcaaatgaaaggtagcaaaacaattctacaaagacacaaa

SEQ ID NO: 1019 - DNA, 328 bp, Homo sapiens
ggaccttttgatcccatcatgggactgttccccagccctaggccactggaatggggggaaagagaaccctcctttccttgttcccactcttgtttcttttgaacatgggttacctcccttcgcgtcttttggaacagaaggggatcataagctcttgagtctctgttttctgctgtcatctactcttcctgcctctggcacctcccagctcctgacttcctcctgcttccccctggagccagagacgtggctgggaagagcccctggcctttgaagccagtggtggtggtgaccaggggcaacaggccactgtgctcctggatgcgtg

SEQ ID NO: 1020 - DNA, 330 bp, Homo sapiens
tgtctcaaaaaaaaaaatttgtacatacagggggttactgtcacatagggctgggatttaggcatgagtcacctgcctgaccagcaagttcttaaattctgcagcaagttcttaaaacaatggctgtagcataaataacccttcataaaaacgctaatcacgatgctgggacggtggctcacgcctgtaatcccagcactttgggaggccgaggtgggcagatcatgagatcaggagatcgagaccatcctggctaacacggtgaaaccccgactctactaaaaatacaaaaaaattagccgggcatgggggggggcgcctggtatcccc

SEQ ID NO: 1021 - DNA, 336 bp, Homo sapiens
aggcttgtgagagccactctgagctaggacctcagctgagagaggctggagcaacaccatggcaattttcggattcactgcctaaactgatgtcagtgggcagatgagcctttcacccaataagctaacgtgcgagggtccttccaaaccccttggcagatggttttttattataggctcaaagaaaaatggggctataaccaagttccttgggggacaggactgtttccatgcttgagcttggaagcaagattgatgggacaaaacacgtacgttggtgttggtccacaccatcaaaacaaacctcctaggtcttgagctccattgaggtttcac

SEQ ID NO: 1022 - DNA, 332 bp, Homo sapiens
  misc_feature (1)...(332): n = A,T,C or G
aacaaaggcttatggattttggtgccctctgcgattttggcagcttttctgctgatttggagcgtaaaatgttgcagagcccagctagaagccaggaggagcagacaccctgctgatggagcccaacaagaaagatgttgtgtccctcctggtgagcgctgtcccagtgcacccgataatggcgaagaaaatgtgcctctttcaggaaaagtataggaaatgagagaagactgtgacaactcatgacctgcatccttaatatccagtgacttcatctcccctttcttcccacaattccaggcaatggcctgtcggaccagacaattctaccn

SEQ ID NO: 1023 - DNA, 329 bp, Homo sapiens
  misc_feature (1)...(329): n = A,T,C or G
gttagccaggtgggcatgtgcataggggtggaacccacagacaccccagcccaggagccattcctgatgtgggagatagtgtgtggtatctccagtgagccccctgaggctcactcatccaaagggcctcagtctcgaacgacaggcacggtcaagacaaggcaatggcacctgtcctaaaattccttacacacctctaggaaatatatccacagataatagcttcgccttgtagtgcatgaggtccttgaatgattcctcaccctcttttggtccagntatctttctccttctatgtagcatttcaaacactccactcacagtagtag

SEQ ID NO: 1024 - DNA, 328 bp, Homo sapiens
taatgtgtgtgccagaatttcatgacctcaaggatctgaattttcaagtcactgcaaaaaggacgtgtttttgggaattttactaattcccttaggcagatactttggggtgagggggaggatgttcatcctgtctaccatctcccttctctgaaaactgtacagctgccctgtaactgggtgggccctagcaccagccacaactatactcaatactttcacttattccaaactactataaacatccacctcccttagaaagaagtactaaaaataaaggcaatcctactcttctgttattaataaaataaaaattaaacactttggg

SEQ ID NO: 1025 - DNA, 337 bp, Homo sapiens
cggggttctagcagtattcgcatgtcatggaggggaagggactacccccagaaataatacaactgcttacccactccatgaagtgaaagatttgaaagacatttctctgttccaaaggcctgtgggcagaattaatagtaattgccagaaaagccaggttcaaaacagacgctacacttgcatttattgaatgagcttattggatatcttggttgcaagcaggaagcaacctgctgacctgagctccctgtggccctggtcctctccactctgaaaacatccaggcagatcttacaactcctccagtcacacccagataccaactctaggccagacg

SEQ ID NO: 1026 - DNA, 331 bp, Homo sapiens
  misc_feature (1)...(331): n = A,T,C or G
gaaaggtctttggacgtaaacagtagaaaactacttgcatatttgaagaaaaagggactttattggaaggctgttggggaactggcaaaaataaggtcctcctgaagaacaaggcttgcagcagacaggagtcaggcagtttcagaggaccttgacaagtgcagcgtataggttaggtgcaggagtcaacctgggttcacgtctttgactctactacatggggcaggctatttaacagctttctgcctcagttttctgatctgtaaaatggtgatgatattactcatctcagtattactgtgaagtttaaatgagctggtatataaaaagn

SEQ ID NO: 1027 - DNA, 327 bp, Homo sapiens
ctgggtgacaaagtcgcaaggttgtgtctcttacctgcccacaggtgcacgtcgtcagccccaccgcctcactgcagcccccaaggttaccgccagccgccgaggggtgggaacggcagggtgatgatatcaacagccaagaaccccctgggcttgtccactgctcaggccgtcccagcccccggggaagcaggtccaccactaggcccattcgacagatagcagcacaatcaccgtcaccacgactggagaatgacatgtcccagcacctagtgccaggccctcttccaagggcttgcatttgcttatccatttaacccccagcag

SEQ ID NO: 1028 - DNA, 306 bp, Homo sapiens
ttctgagggccactactgttcagtgttgagccctcactgccttcaagcactggcatctgcccctctttggctctgtttggtctccttggcttcaccctgagcctcattcttggccatggccaagctttcctggtctggctcccatccagcacccagtgccccctgcccaatatcgcctgatgctcaagcataacccagtcacctttggttgaatgaccttctgagggttagtacaacgctagtttgaattatttttcctttcccctaatttctttgagcagactaagttagaaaaatatccatatg

SEQ ID NO: 1029 - DNA, 331 bp, Homo sapiens
gatataaacaacattactttctcaaaaactctaattcaatatataaatagtataccttcacattcatgaatcctactgtgttcaaagattactagttttctagttattcctttattcatatttatgtagaatatttcagaataagcaatacttaattttaaagaatatgtttcacaaggtattttttgatggtttaaactttgtttatcaacagaagatacctgctcagaagaaattgtgggttttcaacctcagcgctactgaaatgcgtgttggattgcttttgttggaaaaggctgtcctttggatcacaggatggttatcaaaatcg

SEQ ID NO: 1030 - DNA, 332 bp, Homo sapiens
gggttcagggccgggtccctggctgagctgaccccacaggtttcagcgggtgggcccacctgacggaggtcgaccccgacgaggaggtgcagggcgagatccacctgcggctggaagtgtggccaggggcccgggcctgccggctacgctgctctgtgctggaggccaggtgagactcaggggcctgggggcgggcagtgggtcccctgcaactagagaaacccaatgaggaagctgagccccccctcgccccacctctacctcctggtcccagagctggccacctcccatcaaagcctgctctcaagagagggtctcgccaggcacggcgt

SEQ ID NO: 1031 - DNA, 350 bp, Homo sapiens
tacggctgccataatacgacagaacggacctaagccttacaagaagagatgctgtcttggtcttgctggaggaccttgctttacttagatgtcttattattaacgttacctattattgatggaaatacactaatttgtatgggcctagatggtaacatggcatttctaatattggcttcctttcttgcgggcttgattagcttggggaccgaatcactaccgtctagcttactaacttagccaatcttggcagaacatgttcaccttacacactgcacctatacgctcttgaaggcgtcgcaatgaacaccctcctaaattctccatatgaactataccctaacaagtct

SEQ ID NO: 1032 - DNA, 321 bp, Homo sapiens
tgtgcctgtaatcccagctactcaggaggctgagacagaaataaattgtatcagaacagtgtaaacatgtagacagatactgacaggaataaggttttgtgataactttttggttacctgaagcatttatgaatacaggtaagtctgtggctatgttatagaatattgaggtctccattggtttgacttccaaattagcgctttattaaactcggtgtcagtgtttgtacacctacttgggctgtatcttttctactatgaaacatattttaactgtgaaatgaatattttaaagaatcaccttggggccaggcatggtgg

SEQ ID NO: 1033 - DNA, 326 bp, Homo sapiens
aaggggtaaggtagtgttatatgcaaacgcattaagacgggaaataacacaaaagaaaaaaatgagtcattctaggtggaatgtaccttacaaagaattgggtaagatataaacacggtttatctcattggacaatgacacatcatgggcaatgttaataatctgaggctttaataaaaatagaggataattggagagttttagacagaagagtaaaataatcactatgtttttttataagtacctaattgtcatgtaaagtatattcttggccgggcgcggtggctcacgcctgtaatctcggcactttgggagaccgaggcagg

SEQ ID NO: 1034 - DNA, 324 bp, Homo sapiens
tgagactttcctagccatgcaggactgtgagtccattaaacctctttacttataaattagccagtctcgggtctctcttcatagcagtgtgagaacagactaatgcaggggggctattatgttgccaatcacaggtatataataaaaagttaagaattataatttctaagtggtaggatttcccttaatccttttatctatattttcagaagttttcccaggaatacacatactgcttttgaaatgagaagaatgaaatctcatttatagtctatattgacgtctttgcaatgttcattaatccacctttcaggacagccctgg

SEQ ID NO: 1035 - DNA, 190 bp, Homo sapiens
cagggaaacagggcttgaaagaaagaaggatgggggaaaagaaaagagcccagcatcaaagagaagctggttttgcctggagtggccaagtctacctgacacaggcacaatctctgatctcatccacatggccaggagctggaagtactaaaattagaatccaaagtgttctaggctgggcacggtggct

SEQ ID NO: 1036 - DNA, 326 bp, Homo sapiens
attgttatccgaaatagagaaataactcctgttaatcaagaaaaagacagaaacttcaatgggaaaaaaaggaccaatgaaagagacaaactaccatagatcagatttcttcccatagctaaacagtatacaaagaaacttcatatttataattatacaaatgcaaatcaaggcagtgagtcattactcttatcagaaagactctaatttaaaaggataaacacaacaattattagaaaatgtgcatagtgttaactttcactcacttgtagtgaaaagtagtctggaaatattttatacatcatagagaaattccgagaatcata

SEQ ID NO: 1037 - DNA, 326 bp, Homo sapiens
  misc_feature (1)...(326): n = A,T,C or G
gagctagaaatctaggcaatgtggatttcagatgagtttcataacactatctgacacagcgggaagttcaaggaagtatctggcaatattatttttcttatggagcctttccataagaaagaaattcagttataacaaggtcacatttgggtaggtgacataatggtgaaatgacattttctgccaataacaaaacctatatattgtacctgagtggccncnnnccnnaanaattttttttggaaaaaaaatccccccttgtggcccaagttttaaccccaaatttcctattccgcccaactaagcttcttaaattccaggaaaaa

SEQ ID NO: 1038 - DNA, 191 bp, Homo sapiens
aatgatactgtgataaaaggcatccaccagcatgaacttcatatgtgactttgctgttagatctcaggaagatgtaaaaaggcagtttaagatcttttatcccaacttcctggataataaaaagatagtaagtttaggactttataaaagaaataaaatcaagaaagaaatggggcatgaaaaagaataaa

SEQ ID NO: 1039 - DNA, 325 bp, Homo sapiens
gagttttcatttgtggtgagattctctcccaggccacaagacatttcctgctcggaaccttgtttactaattgtaagtactttacaagtaagaacttgttttaaaaacttagcattcaaaaaaaaagctttctttaaaagttatttgattttcttgctttttttcttagcatgctatatttcgagtttcagctaaatgacaaaggacggcttatttatttgctttctttggatgcattcagtcgaaatcattaaattcttgcttaatattcatccagaccccaggctggtttttgaaaggtggggggggggccaaggtttttttg

SEQ ID NO: 1040 - DNA, 319 bp, Homo sapiens
acctatcctcattgtggtccccaaagctcttcctggggcctttctttctctttgacaaagcaaagctaagggagctgggaaaggtgccaagagtgagaagtgagagaagtgatccagaagtgagagctcccagcctcgctgttgactggcctgggaccttcagccctgcctcttacattctcttgcccttcccaaattattaataacacatgagtctgaaatacagtgagctccacagaggaaagacctgtattctctggactattcagaatgttctagggacagtgtgataggaggctgagtccacactctggagctg

SEQ ID NO: 1041 - DNA, 299 bp, Homo sapiens
gcatgaagaaagattggatgcaagacaggtctctgttgctgagatggcaaggatccagtgtgaagacctgatagtagccctaacagctgaaaacagtccctgattaacagctagcaagacaatggagacctcaatcatatagcaacaaggaaatattttcagccaacaaccagaaggtgttcaaagcaaatctctccctccttaagcctccaggtaagaatgcagcctgccaacattttgataccaactttatgagatcctaagcacggagtctagccatgttgtgccagtcttctgac

SEQ ID NO: 1042 - DNA, 320 bp, Homo sapiens
taagcaaattaacatattcagattcccaggatatattttctacataaaaatgaaggatgtatgctattgtatcctaatcgggctaagtatctcatgtacagtcattttgattttacgtatatgtttggatataggatgtctctggaatgatatgaacaactgacaacaatggtagcatctggcaaaggaaactacatagtacaacaatgggagtaagatttccttttcaacaccatacatgtttgttcttactgaacgctattcgatgtgaaaggcagtatattataacggtcaataaaatcaagctctccaggttcaca

SEQ ID NO: 1043 - DNA, 319 bp, Homo sapiens
gacaattttatcccttagaacccagaacagctgggagcagataaaatcttcttgggttatgagttcccagatgatgctgctggcctgcggactgtactttgtgaacttatgctggagcagatggatcagaaaccccggccagaggatgctcaggacccatcaagcccccgcgaggaaggactcagacccccaaccccaccaaattaaagcaggcaatggagaattatactgaagggattcttcggctgggcaaaaacatgattagatctgcattctaaagactgctcgcagagtaaaggatggattggagcagggagtt

SEQ ID NO: 1044 - DNA, 353 bp, Homo sapiens
tacgtttgtgagaagacaacagaaggggagtctcttgcccgtccaccccaagtctgacttctctcaggagggactcatgaacacgtgccctgagcacccccaaaatgacatcacacaagggcagaaaggagctgaagggggaacgtgaaaggcagaaagggagccgtggttgccaggcaaccagccctagcccacctttgtttgtttggtgacagcaactaaggtctggtcagggccggttggccacgctcatgcctttttctctcaacagttgcttctttgaagtagggagcaggctatggtcacctggcgggcctcttcagctaagaccttcacaaagtggggagccttga

SEQ ID NO: 1045 - DNA, 326 bp, Homo sapiens
cgtggcaatctctggttttaaactggcacctggtctagtcaggtttgtttttagattgattactctggtagctgaatgaactatgattttggggaggataagactggaaagagggacactaattttctggaaccttctaaaggataaccaggataattgaggtggagatacaaaataggtgacaaattcgagaagtatatatgaagtaaaataggtaggatttggtgactgatagtggatgtgaggcatgaagagagggatgaggctggcaaatactaagttgttatgatggatgaatgagaggattcccatactgtttgagatag

SEQ ID NO: 1046 - DNA, 272 bp, Homo sapiens
  misc_feature (1)...(272): n = A,T,C or G
ggccgagagaagcagtagtcaataaagagagtgccgtatttcgcagattggagctgagctgtggctgccagaagatagcgaacgaatggaaactgaaagtggaaatcaggaaaaggtaatggaagaagaaagcactgaaaagaaaaaagaagttgaaaaaaagaaacggtcacgagttaaacaggtgcttgcagatattgctaagcaagtggacttctggtttggggatgcaaatcttcacaaggatagatttcttcgagaacagatagaan

SEQ ID NO: 1047 - DNA, 323 bp, Homo sapiens
gtagggggagttttcttatgtggccctcggactttggcaaagagcctgcgcaaatgctgtcaccgatattccagtctggatcctagaaaggttcaattctacttcaacaaagaaaatttttgagttataggaataaggacggtaatctgcattttgcctctttgtatcttcagtaatttacttggtctcgtcaggtttgagcagtcactttaggataagaatgtgcctctcaagccttgactccctggtattctttttttgattgcattcaacttcgttacttgagcttcagcaacttaagaacttctgaagttcttaaaggt

SEQ ID NO: 1048 - DNA, 294 bp, Homo sapiens
cagccccctattacacctgacgtggagactttccaaaacaccgtaggagattgcttcggcatcgcaatggttgcatttgcagtggccttttcagttgccagcgtctattccctcaaatacgattattcacttgatggctgtcacgagtcaatagccttggtactgggtaacatattctgtgtagtattcataggatccgctgggagtactgtcctcttcagatcagccgttcaggagagtacaggagtgttaacactagttgctgtgccttattggtgtcatcacagttcttgt

SEQ ID NO: 1049 - DNA, 326 bp, Homo sapiens
ggaagcgtcggcgacgcatcgcgcgatggcgcgggcgggacagtgcttgtgaaactgaacacaacaaaagtatggatatgggaaaccaacatccttctattagtaggcttcaggaaatccaaaaggaagtaaaaagtgtagaacagcaagttatcggcttcagtggtctgtcagatgacaagaattacaagaaactggagaggattctaacaaaacagctttttgaaatagactctgtagatactgaaggaaaaggagatattcagcaagctaggaagcgggcagcacaggagacagaacgtcttctcaaagagttggagcagaaa

SEQ ID NO: 1050 - DNA, 326 bp, Homo sapiens
taacaaaacagctttttgaaatagactctgtagatactgaaggaaaaggagatattcagcaagctaggaagcgggcagcacaggagacagaacgtcttctcaaagagttggagcagaatgcaaaccacccacaccggattgaaatacagaacatttttgaggaagcccagtccctcgtgagagagaaaattgtgccattttataatggaggcaactgcgtaactgatgagtttgaagaaggcatccaagatatcattctgaggctgacacatgttaaaactggaggaaaaatctccttgcggaaagcaaggtatcacactttaaag

SEQ ID NO: 1051 - DNA, 318 bp, Homo sapiens
acctttggtcatgcatagactaagatgttttacttactttttcttttatttgccaaaaggaaatagaaaattcagaggcgatgttgacttggggagaccttctgaggaaggaagaaatcccaggtgacctggttctcttcacattcctcaggaagcccgctggtttcaggaagacctgcacaaaggggaaacctgacctcataattgaacaaagctgatttttaaacatgggaagacagggctaatggggtggttgtgaggagtattagtccccttcagggagagaatttaatgactgaggtcacaggagacaatctt

SEQ ID NO: 1052 - DNA, 318 bp, Homo sapiens
ggctgcagtggtaatattatattcagtagcagccttagaagagtggtctaagacttgaacctggagcaattttatagcacagaatcctacgaagataggactgtgaacatttgttttctttttcgtgtgtgtcaaactaactggtttttgctttaccaataaaatgtcctcggcagagtaaattttaaacgtgaaaattatagatcttgatattgaatccatcagtgattcaagagatacacctatttgcctaaaacaacctaagatgtattggttatggaatcatgtgttggataggttcttaagacctgtttcctg

SEQ ID NO: 1053 - DNA, 318 bp, Homo sapiens
ctccaatccagattttaaacacaatccttctaatgtaatatctgtacctatatagatttagtatgaaaactatacaagctaaaaaatgagaaagcaaggaaggtgaaaagaaaagatgggtagccaattcttccgggtctcagtgggaagaagaaaaacagatggcaggaagtagtatgactctcttcttttttcactgctggttattatttgtaactcacagggcagaataacagctctagagctcaatttatctggaggagattcagcacacctgcttctctttttccactggcatggctcttggtgtaaatttgt

SEQ ID NO: 1054 - DNA, 314 bp, Homo sapiens
tccagaatgtgagaagagcattttaactccattttatgttctcaaatcccaagaaaataaggaatcaagaaaaatataacaagaaaaataaagaggtgttgaaatgaagaaaccttaaaatctaaaaagattcctaatttttttaatgttgccttaaatttttgcattgaactatctccttcaagtttccctaatttatacatgttttacccagaaataacagtcagctatgcatgctaactttaaaaagtcacgtttatcacatgttgttttcagagccaaaagccaaatgtcctgtctcccgatgattccca

SEQ ID NO: 1055 - DNA, 316 bp, Homo sapiens
ttcctctacaagtcaggtccttgaagtgcatgagcagcccactggggcatgaacttggccctaatgctacacataaccagtagggaggtggtgaaaaagggccttcagtggggggaaatttgtggatcaaggcaccagggctttcactgaaaataaccctgagtcagtggtctgcctcgtccctctgcttactatgtagcctagccatcagcacagctgatcttagctggtctctgattgtccctcatttcttccctcaaaagctattcatgagactgggtacagtggctcacgcctgtaatcccagtactttggg

SEQ ID NO: 1056 - DNA, 314 bp, Homo sapiens
cagggcctattatagacaatccattacagctatgtgaggatttggaaggattatctaaaaggcatcactgactgagaatagcttgatagccgaaggtgatatttgactccttcgactacgacaacatcatcatacttttaatatgtacagggcatagatgtatatatatgatcatatggatactaagagaaatttggaaaaattcaacctacattactaatataagaatatagtgacagcacgtagagaaaaagagattacgtgtttgggggaaaaaagacaagcctaatacaaaggaggtatacggctgggcg

SEQ ID NO: 1057 - DNA, 260 bp, Homo sapiens
  misc_feature (1)...(260): n = A,T,C or G
gtgtttaaaccacccagtctatggtacttgatgtggcagcccaaactgactaatacaattgttaaaatctaccttccagatttcagtagacacaaaatgaaccagcaacatctcagagattgtgaccctttgtgtgtacaaaagatgagcccgctttttttctaaatcagtgtggaaactaaaagtaaaagtaagttatatcctaaaatgccaaagtttgtcgtaatccagtaatcactgccctctaaaatacgccattn

SEQ ID NO: 1058 - DNA, 313 bp, Homo sapiens
caaaacataaatgtattactcaaaatgttttatataggggcacaagagttctttgactgaagcagtttttattttaagttgtttggcctgaaaccattcctggcagcaaaaatctttttaaaagtcttcatgtgtagatttaagctatccttggcataaaataattaatatatctatatttcaaagagcagatggcagaaaggactataccgaaatatattttatttctgagcaccagcataaaaacaagagaaaaaaaaagaacagccagaatacagaggtttttagggctattctaagtgatactatactg

SEQ ID NO: 1059 - DNA, 318 bp, Homo sapiens
cttccaagtagctgggattacaggtgctttttatgcctgccaggccggacgcagtggctcacgcctgtaatctcatggtaataaattctatgaataaatatagagcagagtcaggggtagagagagctggagggtaggcacctatagggaaggcctctctggcaaggccacacatgagaaatgacctgaagcaggagggaaggagtcatgtgtatatttgagggaaagggtgtttaggaagcgggaacagtaagtgcaaagtccctgagatgagagagtgcttgatgtgtttaaggaatggcaatgtgcagccaggta

SEQ ID NO: 1060 - DNA, 317 bp, Homo sapiens
aggttgaagacactcctaattttcaacgtctcccttagcttcttaatacagaatattaacaagcatacaagtataagatgttgatccttagaaacctagttccaaaaggtcattattaatcacaattaattcacagaatttatttatcttgggaatgtttctataaaacattttgtgactaaataggtaaagctaatggcagtatttaactgaaaaaagtaaaggggtacattgactttaataaaaacagttgaaagaactattcaaaacataaatgtattactcacaatgttttatataggggcacaagagttctg

SEQ ID NO: 1061 - DNA, 319 bp, Homo sapiens
cgggtgcagaaaacacacatgttataaacctatatcataaaagcaccataatgtcaagtacttaaaccataaattggataattcggtcagaaaattgctactgctgaacaaaatggcttaatttttttttttttttttttttccaaaaaaaatttctcttttgttgcccaggacgactataatgggtgacaataaaggtatttgtgacttccttgagttttacaacccttttacatgcttaaggcccctgacttcggcgttttgcagcaggatacccacaccccccggataattctttcttttaagtaaaaatggggct

SEQ ID NO: 1062 - DNA, 310 bp, Homo sapiens
ctgaggttatccttttaattaactctgctttgagaagggctaactgatcagttagcagttgccttatccttttaattaactctgctttgagaagggctaactgatcagttagcagttgaatatgacagtgtagtaatttcattactcaaaacagtaaaaactcaatatgttaagcatacagacatacaaatatgaagactttttttccttttctatttttgttggctaattattgggaaattgatgaattttgttatagcaaaggaacggaattggttagtatttttggtgggaagagaagagctgagcc

SEQ ID NO: 1063 - DNA, 156 bp, Homo sapiens
tagtttaggcaatattaacaccttacatctgtaattttagcattttgaatacacagtttttaatgtacattatccattgggcagatccatagaacaagctaaaactttccagattcacattactttaaaaatattttgatttgctgggtgtggtgg

SEQ ID NO: 1064 - DNA, 318 bp, Homo sapiens
gcttctgagaagtcccacctttctgagcagctgtgtttgaagaaagctagtgggaaaagttccaggattacatgtcaggaaactacaagaggtagaaacatttgttgatttaccagtgtttttaacttcctgctgggctgaaaactgcttgtttcgtggaaaagcaaaacttgacagcaaacatctaaaatgaagagctcccaaacttttgaggaacaaacggaatgcattgtgaacactctactcatggacttcttgagcccaacattgcaggttgccagccggaacctatgctgtgtagatgaagtagattcagga

SEQ ID NO: 1065 - DNA, 262 bp, Homo sapiens
gagttccaagtaggtaatccttctgagaagtcccacctttctgagcagctgtgtttgaagaaagctagtgggaaaagttccaggattacatgtcaggaaactacaagaggtagaaacatttgttgatttaccagtgtttttaacttcctgctgggctgaaaactgcttgtttcgtggaaaagcaaaacttgacagcaaacatctaaaatgaagcgctcccaaacttttgaggaacaaacggaatgcattgtgaacactctag

SEQ ID NO: 1066 - DNA, 317 bp, Homo sapiens
gagcagaggtcagggcttcatataaacagcctggtccctaactgcttcccttctgcagtcaaccccaggaatggactttttgttcagtgtctcctttcatcctctttgaagagatgcaaatttgaacagacggtgtcgctgttgggaactgttttgtccctgccatcaattgtatgttcctctctgtgattatctggtgagacagtgcaaaaatagggacaaaactaacaggaaaaaatacaaggaaacaggaaactctagcgtacaggagttggccagcataatttatttttttcttatgcatggtcatgctatgt

SEQ ID NO: 1067 - DNA, 294 bp, Homo sapiens
tggggaggcctctactgggaaccaccttctgtaggacagtcaccaggccagatccagaaggcttgaggccctgtggtccccatccttgggagaagtcagctccagcaccatgaagggcatcctcgatgctggatcactgcagtgcttgttgcagctgtagaatctctgagctgcgtgcagtgtaattcatgggaaaaatcctgtgtcaacagcattgcctttgaatgtccctcacatgccaacaccagctgtatcagcttctcagccagctcctttttagagacaccagtcatt

SEQ ID NO: 1068 - DNA, 317 bp, Homo sapiens
gtgaacaaaacaggattattcctataaacagataaaattaacagaagaaaacttaaagttcaaaatgtattacttgataaaatgctcgtaatattattttaccatacccattttaccatttaaatattactagttttttttcctcaatatccattgataagcttattctttaaaaacagaagtagggaaagtgctagcttttttgcttcttattcacaggaacttgtgcacctgatgtagtatagcacattctcaaacatctaataggtcacttctgaatttttctctgaattttgaataagataaaagtaatttga

SEQ ID NO: 1069 - DNA, 315 bp, Homo sapiens
  misc_feature (1)...(315): n = A,T,C or G
caattctggtagaaaaaatccagaatggttctcagtaatggagctaaatgatttcagctctcctgttctctatagtactcaaatagaaggaggacagtcaccatatttgcttgttgcaattgtgcatgtgggcataagtttcagagatgtatgtcctgttgccccaacttttgcatttcctgtgtcattataaaccttttccaaagcataatgacacaaaacatgatcatatttatatgggtcattagcaaaagggaatagctactcataggagagatgactgngccaagcccaacttggcaacagaatgaagaa

SEQ ID NO: 1070 - DNA, 317 bp, Homo sapiens
tgtggggtacattgtcaagccacaaacataacctgctctgtaataataccctcctacattgttatcttgctttggcacagtatgattcaagtcttaatcttaacactaaaattaagtggtttcactctattaaaggcatcatcctcaactgaaactcactaaagcatatacacgtcacgtggaacagctgaacacaaagctcttaatctgaagttgacctatttagtaaacctatagctcagaatttgacctcatcacctcagaaaatcagggataaaatctgtctttatattgtttcaggtacttgggtatcagag

SEQ ID NO: 1071 - DNA, 318 bp, Homo sapiens
aacactaacccacagggaggatgaaagaggaaagtgcctcctctggctgaaactgccaggatgccctctacttctaaaaacatttggtattttccatagcgcgtttctataacaaaaaatatgtgctagttcccgttagctggaactgacatgtggaaggggccaggtcttgtggggcctggccaagactgcccccctgtgtacagcaagggaggacctgcggttccaccagagccagagcagggccagaggccgcaggggcacctctgagctccaacaaagccagcaacaccccataccgccgaacagacagaaagg

SEQ ID NO: 1072 - DNA, 318 bp, Homo sapiens
tgccatcagcttctgaatcatgtgtgcaccctaccccacacggcagtggagtggcagctctcgtgactgtaaaagccacacaagctcaaggcaaaaagtggaacatgcaaagggaatgaagtgaagagccaagtcagccacgtctctcttccctccctcacctcccagcggctgcctgtgcccatggcaccgagtaaagattttaagtggatcaagatcttcatgtttggaacaacttggccaatgactttatctggtgcatctgagaaactattgaaaggagccacagctggaggaacacagcacttactagggtgg

SEQ ID NO: 1073 - DNA, 316 bp, Homo sapiens
cctactaggtcaagtgagtaccaaggacagcgtggcaggtgaccatacagacgcctgaataacaggaggcatgctgcattgaggcctacctttggaaaaagataccacgatgctttaacaaccgtggttaatagtgttcatgcctttgttaattgtactcatgaagtagtaataaaggttaatattctccattggcattatcaaatattaaagtactggccaggcgtggtagctcatgcctgtattgccagcaatttgggaagctgaggcaggtggatcactagaagttaggagttcgagaccaacctggccaaca

SEQ ID NO: 1074 - DNA, 316 bp, Homo sapiens
ggagaagaaagacgacagcgggaacacacaagaagaaaacttactcttcgtagaaaaatagaagaggaatggaagacaaaagagatgttacttctgacaaggatggcagaagatgttaaaagagaagagaggatagaagaacaacagcatagaaacagagaagagagtgacaggaaggaggtataaatatttcaggccaaggttcaattatttcagcgcaggtatcacccacgagaaatttttccagagtttcacaggcatttttggatccttcaaaagaagagaaggagacaaatgctgattgcgatggaagacc

SEQ ID NO: 1075 - DNA, 314 bp, Homo sapiens
tactggaactttctaatttgtaaaaaaaaaaaaatcctaaatactcttaaatcaacaattacaacccttcataagccattttgggtaaatttttgttcttttggaaaaaaccacactttcctgtatatgtttcacaaaaaaaaaaagggtctccccattttcccagggaccgagatttaagagttgcttgttattgcagcaaaacctcacctcttctgaccaatcatggtggaatttctgggtgtgcgcccatgtgcctgtgtgagggccgtgcgtgtttcaccccgccgaaaccctcgcctccttaacactcc

SEQ ID NO: 1076 - DNA, 313 bp, Homo sapiens
actttctgctttgccccctccctacctctatgctgatgaagagccagccatgcctccagcccttcctgaggccaccacatgatcttgcttattttcccattccaggaggtcacctgcagggctcctcccacctagccacaatggctagtcccgctgcctccacagtggccctgcagccccatcccagacccactgcacggggtcacaagcttgtgcagggtggacagagcagtagctcatggcagacattccttctgttcatctgttgcagggaaaatggggtgaggcatgggaggggttcccagaatcccag

SEQ ID NO: 1077 - DNA, 313 bp, Homo sapiens
tatgggaggaaaccaagcctcagagagacagaatcatttgtgggagcaggtggagttgaatccaggtccgccggattccaaatccgacaccacctcccactttctgactttgttaagattccacccgcactagcctgggcccgggcaggcctggggtcagtcccccactgcccggctggaccgcagagagcagggcacagctcttcctaccctagttggggccagctgccaagatgcctcttggggttgggaaaaggagctgagctgcttgtccaggctggtgggtgattcctggggcacctgtttcagtgct

SEQ ID NO: 1078 - DNA, 279 bp, Homo sapiens
  misc_feature (1)...(279): n = A,T,C or G
aatcactgatgactcttggtaagcccctctgtgggaaagtagtatctccctgggtatccaacttgcagggagtgttcaggatctcatgttctgtagaggtcataaggagtgccagctaatctgggctgtcatgtagacacagctcagtggagagttttctggcaaaaggaggagcaaaggccctggggcagagaaaatcttggagagtacggaaaggccatgagactgaagtgtaataaatgaagcatgaggagtgtgtgcgangacaggacgccaaga

SEQ ID NO: 1079 - DNA, 309 bp, Homo sapiens
aacacaagagtcaacactctgtaattggaaatattaatctgtgtgaaggaaatagctaaattaatgtcaaacaacaatcccgaagacaaagctgatgccccagactcagtttcagttgggattaaatagatattatttcagtgtttattaaaagatgagacacattaactaggttatcactcgtatttaagtttctttaactatacgggtctaatgtaggtactaaacaaagttaaaaatattttaaaatagctaaaaaataagcaaatttgcatacagaaaataaatttattagacacttttacattt

SEQ ID NO: 1080 - DNA, 306 bp, Homo sapiens
  misc_feature (1)...(306): n = A,T,C or G
agggggtatcttgtagattaggtagcaaaattggaagtcaaagtgtccagtggcagtggtgaaaagtgttgaccaacctcggtttgatgaaggtggcgtgaaagtcaacttaaacttttcactgggaagcaggatatttctgagcctaatgcttatggagaattggcctctgtatttccctccagactttcatgaggcacccggcttggcccaaacatgagccagatgctgaatggcctgccaatgcctgccaatgtgaaaattattcagtttggttaagaaacaatttactcatattctggnttg

SEQ ID NO: 1081 - DNA, 303 bp, Homo sapiens
ctgcttcatgtttatacctcacgtgattactcatttcaagcatactgtctctttccgagagtaatgatgaaaacattgaagaaaccatcgatccaattacccatactgatcccagaagtataaagaaaatggtaatattcttggatggcttcttttcatatttggtatagcttgatataaagtaggaagcctgcatgattttactgtgctctcagaatagggatttttgttttgctttaacgcaagctgggtgttggaaggagatttgaaacttgtgtttggctgggatatgatgtagacagg

SEQ ID NO: 1082 - DNA, 247 bp, Homo sapiens
tcttacaataatcctgtaaggtaacatatacctctttttataaatgaggaaattggggcttagctaagttaacttgcacaaggtcacccatgtagccaagaagcgttacctagcttacattattaactcatgccacttttattttttgagacggagtctcaccctgtcgcccaggctggagtgcaatggtgcgatctcagctcactgcaacctccgcctccggggttcaagcgattcttgtgccttg

SEQ ID NO: 1083 - DNA, 293 bp, Homo sapiens
gaccagctcaaaagagaaaaaggtgcaaacaatgcgaagaacacttaaggcaagtatctaactacatatttggaaacaagtgaatgaaactgtttatgtaccagagatagaaaaaatattataacagtctacaggtgttgcattagtgttgtgtgcttgtctttacaactaggcagataaataaaaacaaatatgtttttaaaattccaacatgtggtagtttgaaagtgtgtctcaccaagtggaatcataaaatctggctcaaattttagataaatttggacttaaatata

SEQ ID NO: 1084 - DNA, 298 bp, Homo sapiens
gagcctttccatcagcccctgtgctgggtacgggtgaacctggggttcctggtttgagctcatggagagccttgggccactaggggttccccaacgcggtggaaagcccatgagaggaatgtgagctgtgacggaggagaagtgaggcgctattggcataaaagaaaactaatcctcgccacggggagcgggacctgggtctcccatggaaaaaagtgccttcccatcaatccctgcgctgggccccgtggacccaggcgaccctggttctaggcctgggtgcacctcaggcccgcta

SEQ ID NO: 1085 - DNA, 301 bp, Homo sapiens
tttcttcagggaatttatcagctaccttctcccacttgaatactatatttaaattccctgtatatctgtattggaatatgcctgacaaaatataataacctgagtatgtttgcttatagatattacctacaatatagttaaattgtatcattttatgtatcaatggttgaaatactggcctagttcatccactattgttttaacaaaatgttgacaccttcctgttggtttaaatagaatctcccttttctatatctttgctgttactattaatatgacatgtcaagtcagatgtagacaa

SEQ ID NO: 1086 - DNA, 326 bp, Homo sapiens
  misc_feature (1)...(326): n = A,T,C or G
ggattctacaagcttttttggtggaaaacaatgataagtaagccctattcatgaaaccgtatgcctctcattttgaaatgaataattgcacgtacagacttataagaataatggcacttatagtgactgctatttttaatgtctttttcaaagtgctcttctaaaacattcttctttgacatttctgattcttttacccagcaagntttatgtatttttctacttctgaggtcacctgagtaagaattttctaacagataccactttttttttttttttttttggaaaaggagtctggttttgcccccaaggttggggggcggggg

SEQ ID NO: 1087 - DNA, 295 bp, Homo sapiens
cacccttcccccatgccaacactgccactggcagaaaactaccgagggagaccagcagacctgtccccaactcagtggtagatgctgcccatgttaacgtgcacacagaggatgtacacaagcccatgccaaccggtgcgctgccaacaccactggcagtgcaaatgtgtgtatgggcaccactgggttcccctacccccatgccatacagccaccaccaaagctgtgactgcctgcacaatggctggcatatctgcactcaccagcacccccctacagttgatgagcatgcacg

SEQ ID NO: 1088 - DNA, 286 bp, Homo sapiens
  misc_feature (1)...(286): n = A,T,C or G
gtgctaagaaaataatctctcttttttctgttgaaaactagcacaagtggcctgtgaacttgcttgatgggagaaagcacatttaatctggatgttcatctgcaaagcatttagtttaacagccacagaaaaattattcctgcgtaattgatccgtgaagcagatttatcgtgactagaccatttgtgtgtgtgtgtgtgtgtatgtgtgcgtgtgcgtgtgtgtgagtgtgtgaatganaatcaggatgacggtgtnacaacagcaccctctggagacgatagtg

SEQ ID NO: 1089 - DNA, 284 bp, Homo sapiens
caggtaaattgcctttgcctctctcctgggctagatcctgattcctgggcctgatggcttcctatttctcagttcaccctcatttggtgaaacatatcctcaaatatcttctttaaaaagtcatggccagaaggctgggcactgtggctcacgcctgtaatcccagcactttgggaggccggggcaggcggaccacctgaggtcaggagtttgagaccagcccgcccaacatggagaaaccctgtctctactataaatacacaaaatttagccaggcgtggtgg

SEQ ID NO: 1090 - DNA, 276 bp, Homo sapiens
attcattatattatggtttacttttgctttatactaattattagctcaaaaacatttatttaaaaaattgaactagaattttaaaatataaaaaatttaaactaacaagttagtcagttttactattagcatcaaccattataagtaattcttttctataacagatcaaaatctcagtgaaaattcataaaccacaatagttgtctcaaattatttatgttgtcaaaataacaataagactattgctacctcaataataggtacctcaaaacaaat

SEQ ID NO: 1091 - DNA, 270 bp, Homo sapiens
gaggcacgataaatagtacaaaaggcatacaggtttctgcaatgtgtgtacactggagcccttataatgaagacccagacacaagatgggtgcagaagcttgtctaccatatgaagattacagaaagaatggggtcttggatcacatgggaaaaaaaaaggttatgtgagaaaaggacgctgactagcaacagtggacttattacgtaggcgaaacctcactgggagcagtcctcagagtgcatagagagaaaatgtttctttcagacct

SEQ ID NO: 1092 - DNA, 269 bp, Homo sapiens
  misc_feature (1)...(269): n = A,T,C or G
tcccaacactagcttgctatctgagaccatctgcctgctgctggctttcctggcacaaacattctgcatgtaggcacagtgtgctcctggactccatgtcacctcagttcaccctcatgttccctcggttcctgtccccagtccagcaagcagaaactgattacagatcttaacagaagatacagattgaaaataacttgcctgttcccgtggactttatccactagtcaaggaggacaagtggacaaggggagagggtangtgggggc

SEQ ID NO: 1093 - DNA, 429 bp, Homo sapiens
  misc_feature (1)...(429): n = A,T,C or G
cccatcgattcgcccaccttcatcctgagcctaaaaggccatctctgagcacttgggcagccactcctctgggcctcagagggccatgagcttggccaggtaggcacagcggcggggaagtcacagctgtcaggtaccggccatggtgcaggtgggaataggagatgccagagctgctttagctgagagaaagcaaacagtcagcagtgctcaaaggagcaaaacttcgaatgtgcacattgacccctgacacctgcaagcataacacagatcctaagactagagtgaagtaggaagaagaattagaaaatccagtggatgtcctgagtatagggaaccagggccgctgaaaatcagtaaaggttgattacctggngcgagaccgggtgactgtggcagtgcaggtgaaggtaccctggaccttctcag

SEQ ID NO: 1094 - DNA, 426 bp, Homo sapiens
ggcacgaggccacagaaacatgcccctgattcagtgcctctgcttagctgtaacatgttaatcagaactacctggcatcttcctgaacaagactttcaataggggccagtatgcttcgcttcatccagaagttttctcaagcatcttcaaagatactgaagtactctttcccagtgggactaagaaccagcagaacagatatactttctctcaagatgtctctccagcaaaacttttccccatgtccaaggccttggctttcctcatcatttccagcgtatatgagcaagacacagtgctatcatacatccccctgcagctttaaaaagcagcagaagcaagcacttctagccagaccctcaagcaccatcacttacctaactgacagcccaaagccagcattatgtgtaactctggcaggactaa

SEQ ID NO: 1095 - DNA, 427 bp, Homo sapiens
ggcacgagcaaggaaggagtcctgggagcatggctttccctgagccaaagccgcggcctccagagctgccgcagaaacggttgaagacgctggactgcgggcagggggcagtgcgagccgtacgatttaatgtggatggcaattactgcctgacgtgcggcagtgacaagacgctgaagctgtggaacccgcttcgggggacgctgctgcggacgtacagcggccacggctactaggtgctggatgcggccggctcctttgacaacagtagtctctgctccggcggcggggaccaaggcgtggttctgtgggatgtggcatcagggcaggtcgtgcgcaaattccggggccacgcatggaaggtgaacacggtgcagtttaatgaagaggccacagttatcctgtccggctctattgattccagtat

SEQ ID NO: 1096 - DNA, 423 bp, Homo sapiens
ccccatcgattcgaattcggcacgaggaaaccttaaactatataggtctgctggactgtgtggctgagtatcatagagattttcattgtgatctattacctacaaagtcttcctgtggtttctctttaggggcaagctctgtgtgattgattggaagacatcagagaaaccaaagccttttattcaaagtacatttgacaacccactgcaagttgtggcatacatgggtgccatgaaccatgataccaactacagctttcaggttcaatgtggcttaattgtggtggcctacaaagatggatcacctgcccacccacatttcatggatgcagagctctgttcccagtactggaccaagtggcttcttcgactagaagaatatacggaaaagaaaaagaaccagaatattcagaaaccagaata

SEQ ID NO: 1097 - DNA, 387 bp, Homo sapiens
  misc_feature (1)...(387): n = A,T,C or G
ttttagtttatgcagagcgactggtctttcttagcattttttttgtangtgattggcagaaaataaaaatggccatatgtttgaaactcagcatcatctgccctagggaagtaataaacaaaacaagagagcacaaagactcaaataaagaagcaaatggggcacatcaaaaaaagtctattgagaaaatttaccccagtagctaaagataactgatagtagagtataaattgaggtataagaactctcagtgttcagtatgacagtgggtacacttaagactaagtgcttttttttctcatttaacataatttaatacttatagaagtttcaagaactgtacaaagaatttcagaataatttttacccagatttcccaaatgttat

SEQ ID NO: 1098 - DNA, 415 bp, Homo sapiens
cccatcgattcgaattcggcacgagggtatctattttaagtcaggggctttactagccgatttagttctcacaataaccatgtggagaagctgtgacatttttaatttacaacctttctggggctcagacataaagttacctatccaaggttgcagttgggtagtggtgggaccaggatggacaactcattggccctgcctcaaaagccatacctcttctcctgctatgcagaatctgtttctcctgaatctctgtgatgctggtgggaattgtttgcatagaggaaggacaataaccctgccatcgtgagttaatgtccgggctggtcacagtggttcatgcctgtaatcccagcactttgggagtccaaggcaggcatatcatttgaggtcaggagtttaagaccagcctggc

SEQ ID NO: 1099 - DNA, 420 bp, Homo sapiens
gatcccatcgattcgtggagctaggtctccaggtgggcctggttcccaggcagcaggtgggaaccctgggcctggatgtgaggggcggtcaggaaggggtacaggggttccctcatctggagttccccctcaataaagcaaggtctggacctgccttcccaggcccttctgtgggggtgaaggtggggaaggcctgcggcgcccagatcactgccttagcagtagtcttgcctgttcagtgcaaggggcaggttttggggggaggaattcttagcgcaaggacgggcctcagccctgtcgcctccagggggccgctgacccaggtggggagagggcaaaagaagggtgggggacgtgggcaggccaggctcacaggtggaaatcacggatgcagggtggtgcccacgccaaggcctgcag

SEQ ID NO: 1100 - DNA, 383 bp, Homo sapiens
  misc_feature (1)...(383): n = A,T,C or G
gacttccggtcggcgtgagcgtgaggtgtgggtgttcgtttctcaagtaaaacatggctaaaagcttacggagtaagtggaaaagaaagatgcgtgctgaaaagagaaaaaagaatgccccaaaggaggccagcaggcttaaaagtattctcaaactagacggtgatgttttaatgaaagatgttcaagagatagcaactgtggtggtacccaaacccaaacattgccaagagaaaatgcaatgtgaggtaaaagatgaaaaagatgacatgaaaatggagactgatattaagagaaacaaaaagactcttctagaccagcatggacagtacccaatatggatgaaccanaggcaaagaaaaaagcttgaggcaaagcgagat

SEQ ID NO: 1101 - DNA, 409 bp, Homo sapiens
ggcacgaggcccggccatgcttgtcctgttgaccgaccaggaggtcctcggggagctggtgcgggcgaagctgccggctgtgggggccctgatggagcgtctcggtgtgctgtggacgctgctggtgtcccgctggttcatctgcctgtttgtggacatcttgcccgtggagacagtgcttcggatctgggactggttgtttaacgaaggctcgaagattatcttccgggtggccctgaccttaattaagcagcaccaggagttgattttggaagccaccagcgttcccgacatttgcgataagtttaagcagataaccaaagggagtttcgtgatggagtgtcacacggttatgcagaaaatatttttcagaacctgggaggcttatccctggggcacccgtcgccca

SEQ ID NO: 1102 - DNA, 396 bp, Homo sapiens
cgttgctgtcgtaaaaattagtgatagaggtagagatttacatatatataaatctcattcattacttactatagaacacagtaattttaatatgttcctttgaaacatatgaagaaaagcagagttttcacatatatgtagttagaaaagggaaagcgctataataacagttagtggatttttttgttactatatcaaactccccacatatttcggaaataagttgcaatgtagaatctgaaagcctatgactaaacttccatactcaagtgttaaaagctattggtttagcatgcactttaagatgatattttacccataagtgatttttgacatcatatattggtcatttgaaaaatactgcttcactgtattatgtaattaattgcataaatg

SEQ ID NO: 1103 - DNA, 395 bp, Homo sapiens
cgttgctgtcgacctagttggtgcctcacagggttcctgctgcctggtgtcttgctgatcatcaccctggtcacttcatgctgattagaatgacatctctttcgtctcctattttgttacccaactcttcctatttttgttaccaatcactgtgctctctgccgccccctggctccaggctaatttttctggaatgaattgagaaggtggcgtgctggcctgagctgatggaccacttggtgttttgcgttttggcccatgtttgctgcctctatctggtctgccttgcccgtttgcctgttcctattcagtgtcttttctattttttcctctctcgttcatgccttctgttttgctcttgtccctggagcatatctgcctaattaagatgttgg

SEQ ID NO: 1104 - DNA, 396 bp, Homo sapiens
cgttgctgtcgggaaagtaaccaagaaacctctaggaattagtgaaaaaagaacttttttgaggtgtgttactatactgctgtaagttatttattatataaagtattgtaaatagaatagtgttgaagatatgaaatatggctatttttaatggtgacaattatgacttttagtcactattaaattggggttacctatatcagtacaatttgtagttgtttccaggtttggctaataatcattccttaacctagaattcagatgatcctggaattaaggcaggtcagaggactgtaatgatagaattaaattagtgtcactaaaaactgtcccaaagtgctgcttcctaataggaattcattaacctaaaacaagatgttactattatatcgatag

SEQ ID NO: 1105 - DNA, 380 bp, Homo sapiens
tactccacaaatagagatgtatctactcggatcgggggaactgtaggagagaatatgtgaaagccacttcctacgcccaatacgaatgagttgtctttaaacatctgccaggcccaggcagctctccatgcaagtgcaagttcacaaagaagttttctactcctgtcctattccgccttcctttgatcctactctggaagagttagaaactggcaaacttggggtgcaagcataaaaattaggtgtctcatctccttccccactgtggacttctagcctacagaagttcctagctgaatgaaagacctagattttgtactatctcatgtttgggatttggattgagaccacaccatagaagagaatcatgagcctagagc

SEQ ID NO: 1106 - DNA, 289 bp, Homo sapiens
acttgagcccaggaggttgaggctgcagtgagctgtgattatgacactgcactccagcctgggcaacagagcaagaccctgtctcctccttccccgtcccctccaaaaaaaaaaaaaaaaaaaaaaaaaaagggggggggttttttcggggaaccccacggggaaaaaacctttgggggggtggggcccccccccccttaaaggggggggaaaaaaggttttttttgggaaaattgggggcgcttttgtttttttggcccctttaaaggggggaaaaaacgagtaacag

SEQ ID NO: 1107 - DNA, 393 bp, Homo sapiens
cgttgctgtcgaggaactcggccgcccggagttgtggcctcatcgtgcttcccgccaaaaacgccttggtactgtcgggacgcggctaagcgtggacgcgcccgcatctgcccctcctccgcagtggtggaagacacccgcggagcgccggtggataagggccgtttcctgagaccagagctgtatccgcagcagcctacccgtatattacaagaaatctcaagtcaaacactggaaaagatgtcagaagattcagaaaaggaagactattcagacagaacaatcagtgatgaagatgaatcggatgaggatatgttcatgaaatttgtaagtgaagatcttcatcggtgtgcacttttaacagctgactcttttggcgatcccttattcccc

SEQ ID NO: 1108 - DNA, 397 bp, Homo sapiens
cgttgctgtcgatattctgaaagatgtcagtggagtgcgagctcttgaaagtgctgttcaacatgaaaccttaaactatataggtctgctggactgtgtggctgagtatcagggcaagctctgtgtgattgattggaagacatcagagaaaccaaagccttttattcaaagtacatttgacaacccactgcaagttgtggcatacatgggtgccatgaaccatgataccaactacagctttcaggttcaatgtggcttaattgtggtggcctacaaagatggatcacctgcccacccacatttcatggatgcagagctctgttcccagtactggaccaagtggcttcttcgactagaagaatatacggaaaagaaaaagaaccagaatattcagaaa

SEQ ID NO: 1109 - DNA, 393 bp, Homo sapiens
cgttgctgtcgaaaaaggagagctcttcttcaagataaggaagtggtagttatggtggtaacccccggctatcagtccggatggttgccacccctcctgctgtaggatggaagcagccatggagtgggagggaggcgcaataagacacccctccacagagcttggcatcatgggaagctggttctacctcttcctggctcctttgtttaaaggcctggctgggagccttccttttgggtgtctttctcttctccaaccaacagaaaagactgctcttcaaaggtggagggtcttcatgaaacacagctgccaggagcccaggcacagggctgggggcctggaaaaaggagggcacacaggaggagggaggagctggtagggagatgctggctt

SEQ ID NO: 1110 - DNA, 403 bp, Homo sapiens
  misc_feature (1)...(403): n = A,T,C or G
cctcgggctaccaggttttagcagcaacttacaaccaggctgcccagctctggaaggtgggggaggcacagtccaaggagacactgtctggacacaaggataaggtgacagctgccaaattcaagctaacgaggcaccaggcagtgactgggagccgcgaccggacagtgaaggagtgggacctcggccgtgcctattgctccaggaccatcaatgtcctttcctactgtaatgacgtggtgtgtggggaccatatcatcattagtggccacaatgaccagaagatccggttctgggacagcagggggccccactgcacccaggtcatccctgtgcagggccgggtcacctccctgagcctcagccacgaccaactgcacctgctcagctgttcccgagacan

SEQ ID NO: 1111 - DNA, 360 bp, Homo sapiens
gggagtcggagggggcagctagccgagatgacgaggcaccactccagcctggcgacagagtgagattttgtcctaaaaaaagaaagaaagaaaatgaaaacatttcatctggaatatccaaaattaggtttaatatattttaaatctcattagactttttgatagattgctgtaaatattatgtgaaagttatgcttgtcttcaatttcagtggtgttagatatctaaatacaagcctggctatttttggtttttttttttttttaaaaaaaactttggtcttcaacccggccggaggggggggggaacaatttgggtaaaaggaacattggcctccaaaacccccccctttccccggcg

SEQ ID NO: 1112 - DNA, 382 bp, Homo sapiens
cgctgctgtcgttaagtttcatggttaagctgttttcagcaggcccacgagtatcaagaacaaaagggacggtcctccagtaaagatggccatcaaggcagcaaatctaatgactccggggaagaagcataaaaagagtttatttttgtgtaaaggtcacccacgcataattcttcctgtgcccctagcttggcaagcccctttactggaaccctggtcctgatatatgtttaccaggcggacgtctgtgcgtgctttattctcttctttttctttatatagcccccacccccatcccctgcctttttttttttttttggaaaaaaacaccacctttttttggaaaacaaaacaacatttttggggctttcccccccccttg

SEQ ID NO: 1113 - DNA, 360 bp, Homo sapiens
  misc_feature (1)...(360): n = A,T,C or G
ggcggctggcgcggcggacgggatgaggcgctgcagtctctgcgctttcgacgccgcccgggggcccaggcggctgatgcgtgtgggcctcgcgctgatcttggtgggccacgtgaacctgctgctgggggccgtgctgcatggcaccgtcctgcggcacgtggccaatccccgcggcgctgtcacgccggagtacaccgtagccaatgtcatctctgtcggctcggggctgctgagcgtttccgtgggacttgtggccctcctggcgtccaggaaccttcttcgccctccactgcactgggtcctgctggcactagctctggtgaacctgctcttgtccgntgcctggctcctggggct

SEQ ID NO: 1114 - DNA, 337 bp, Homo sapiens
ttatttgggtcttgtgggaagaataattattgctattggttttgttagtatcccaaagaaaagttattatttttaatatacgcacctagatctctgtctctctctacacacacacacacacacacacacacacacatatttacatatagatataaatctggaatgtatctttttatacatacatttgaaatataaatcaatatctctgtatatatccatttatacttatatatatggtcatattggtattatttatagatttaagaaaactactttgttaaatagattggcaagattctttgagtacgatgaaacttcaaattgcctataaagtaag

SEQ ID NO: 1115 - DNA, 329 bp, Homo sapiens
ataagattggatgactgcttgaaagttatatgaaactgtgtaattcagcttgcagaaattaagttccctgcttcatgtttatacctcacgtgattactcatttcaagcatactgtctctttccgagagtaatgatgaaaacattgaagaaaccatcgatccaattacccatactgatcccagaagtataaagaaaatgttaatattcttgtatgtcttcttttcatatttgggatagcttgatataaagtgggaagtctgtatgattttactgtgctctcagaatagggaattttgttttgttttaatggcagctggcgttggaaagag

SEQ ID NO: 1116 - DNA, 330 bp, Homo sapiens
  misc_feature (1)...(330): n = A,T,C or G
ggcaagatgctttctacagtagacagttccataagagggcagacagttgagggctatttaccaaaagccagtcctcccagctattgggagataagtcccaattcttgaagacagggtggcatatcactagtacagtaatatagataaaagttttttaatgatagtttagcaaacgtgaagtttttaatttatttaaattttatttattaaattgcctgtgaatgtgacactttcttcatgcatgttttatcaggtaagtgcttctttctcccttgaaaattgtaattctgcagagagggagctactgtaaatttaagctttttgtttgtn

SEQ ID NO: 1117 - DNA, 322 bp, Homo sapiens
aaatgatacctttaaaaaagcctcttcctaaagacttcttttaagtaaaatgatgatcactaattactttgttgtgagcacaaataagaattactttcttcaaaaattctaactaaataaattactccagtcaaaaagatgtactcaattaattctttattaagggcgttgtaaaatctaagtgattgttccagagaagttaggcagtgccaggaaaatatttatcacttagcttagtaattatttacttagaaaaagttcaaaaaaggccgggcgcagtggctcacacctgtaatcccagcactttgggagaccaaggtgg

SEQ ID NO: 1118 - DNA, 324 bp, Homo sapiens
aaatgatacctttaaaaaagcctcttcctaaagacttcttttaagtaaaatgatgatcactaattactttgttgtgagcacaaataagaattactttcttcaaaaattctaactaaataaattactccagtcaaaaagatgtactcaattaattctttattaagggcgttgtaaaatctaagtgattgttccagagaagttaggcagtgccaggaaaatatttatcacttagcttagtaattatttacttagaaaaagttcaaaaaaggccgggcgcagtggctcacacctgtaatcccagcactttgggagaccaaggtgggc

SEQ ID NO: 1119 - DNA, 318 bp, Homo sapiens
gtgacaataatgtattttataacattaaccatttttagattctttgaataaactcaatttggcaaaggtgcgggtggttttttttttttaaaatagggcttgttaaacttactttttggggaattttgcatttataaccgggccttcatcatttttaactggaaaattctattctaagttataaaacttaaggcaagttactcaaataatacattaatacttgcccacgaatctttaaaagaatccagaaaaaaggaaactcccttttttcttcaatactacctatcctctgccccaaccttttctattcattctttt

SEQ ID NO: 1120 - DNA, 187 bp, Homo sapiens
acacttttaaatatgtaatgcttccaatcttgctttgtgtatctcatttaatttgttataaggtagtactgattttagcatattaatgcgacttcttccttgttgtttgctttggtctgtggtcatccagagagcttaaattgtcattattttgggaagaaaacctgtatttttgttagtttacaat

SEQ ID NO: 1121 - DNA, 319 bp, Homo sapiens
aactagatggagtcctggcactcactgggattgagaacacatgacaaactaataggtttactgggcaggcggctaagctgatctacttgctggttcaattagctccactttccggaggctagcattttcccaaccttgccccatgctcttgtgggtacatttaccctatttggggccttagcgctttacaaatgaacgtttcagtttaagagacattgccgcataacttatattaagtggtatgaattcaaaagcaagctctgccactacacatcagaatccagcactgaaggaggtgtggaagtcataaagatggaca

SEQ ID NO: 1122 - DNA, 174 bp, Homo sapiens
gtagatactatgtgttgaagtctatagctaagcaacttaagccaaaaaggtctttcaactgaagctttaatcaacttattttggagatgttctctttcctttactcatgcgtgattcctaaaataataagatacatgggattaaatagcccttggcttttaacacaaatcaggt

SEQ ID NO: 1123 - DNA, 177 bp, Homo sapiens
  misc_feature (1)...(177): n = A,T,C or G
anaaacaaaagccacatcctgttttttatactgtctttttgtggcttgctcatggcatgaattttctagctgtcaacaaagggaggggcgcttttgggctggaggagacaagaagccttcaggaaaaaggagggcttttgatacattttctttctttccttcctttctttccttcct

SEQ ID NO: 1124 - DNA, 392 bp, Homo sapiens
  misc_feature (1)...(392): n = A,T,C or G
acagttaagaaaatattacagaatgtagaacaaagaaacaaacagaaaacaaattagtgaaaaaaaattacacacacatacacacacgcacacacttatctatctctctatatatatctagttcagtacttgcaatataggcatcctagagagaaacaatggacaaagtagaaggaaaaatgatcaaggaactaataaaggagatgttcccagactaaatgcagtcataagtctgcagttggagtttgcttactaagtgtccagcacattaaataataaaaggctcacaacctaaacagatttttgagaaatttgaacatccaaatgaaaaaaaatagaaaatcctaagtctttcagagacaataagtaactacaaaggaagaanaatatga

SEQ ID NO: 1125 - DNA, 415 bp, Homo sapiens
cgttgctgtcggtgaaagagaaatgtttttcttgttgcattgattacattttataaatttgcttagctggaaagtttgggaaaagaggcctgtttgtcaattgtacaaccgattgtgaagctctagtgtgaatatttttacgtctgtattagacattttctttgcaaatctattgttcgattgaaatgtaaatgaaattaaagatggtgtacacccatcatgtaaaaagcaggcaccatctctaagatggatttaatgctcatttttaaggcatatactcagcttctatttaaaactataatttaaaataattctgtacaatgaaatggggaatatatatgggaataaattctattccatttatttcaatttgaatttccaaattgtaatgtttccctttgtgctataggaatag

SEQ ID NO: 1126 - DNA, 386 bp, Homo sapiens
agaggaggagaatcgggagcagaagaaggaggaagagatgaagagaacaacaaaagaatgaggaaaagagaagaggacgacaggaggaggagaggatgagaaaaagaggaaaggaggaaaggaagagaaggaggaggaggagaaggaggagtacaggagatggacaaggaggaggaggggaccaggaagaggagaagacgacgagaaaggagaggaggagaatcggcagcagaagaaggaggacgagatgaagaggtgaatgagaggaggaggaacggagaacataacgaggaggataacaggagtggacatgactgcatgctgcattcactcggacacgccgccccttatttcaggacgaacccgtggcctatgtgataccgccc

SEQ ID NO: 1127 - DNA, 423 bp, Homo sapiens
  misc_feature (1)...(423): n = A,T,C or G
aggcagctgatacactaggcatagagtgtttgcagcacagagaaaagtgcagcagcacctcactcgatcctgctggcattggctttcagctgcttcttaactttgggtgaaacggcagctgccaaccagtcacactggctttttgtgagaccactaccattcccgagatacttctgattagccatgcactctgccatagcctcaggaggttggaactttcagtacctggaagaagagtttttacccaaagaacagcttcttcctttatgatctggccagttgtcagtggaggaaggtgtttgtcccctcaggtggctgaaaggtaactacataattgataagagtattaggaataactatagtcttgcccttcaaactgatcttgaaccaactgtgtacatactttggggcactaaggaaaan

SEQ ID NO: 1128 - DNA, 413 bp, Homo sapiens
cccatcgattcgaattccgttgctgtcgggggaagactcggagtgcgatggcggcgcaaattccaattgtggccaccacttccactcccggaatagtccggaacagcaagaagaggccggccagcccttcccacaatggcagcagcggcgggggctatggcgccagtaagaagaaaaaagcgtccgcttccagctttgcgcagggtatcagcatggaagccatgagtgagaataaaatggtgccctctgagtttagcacaggacctgtggaaaaagctgccaaacctttgccatttaaggatcccaactttgtgcactctggccacggtggcgcagtagctggcaagaagaacagaacctggaagaacctgaaacaaatcctcgcttctgaaagggcattggccgtggcaacc

SEQ ID NO: 1129 - DNA, 333 bp, Homo sapiens
aaccccactgtaggagcactcttgaagaaaatctgccttaccatctttaacaagagtttaaaaatacttttttctttaaaagttacttactgatccagccctttataagaagaaaaacccttagtccccattttctaacagtgaatttattagttttctttaaagaaaacaataataaaagacccagtcaaaatctattttattcatcaagaatcttctcctattgagttgcttcattccattaagcttaaatcagcctagactgaaagaacctcagatacttaagggtggttcattatgttctatagatattctacttatttataatgaggc

SEQ ID NO: 1130 - DNA, 418 bp, Homo sapiens
cgttgctgtcggtgactctctcttctagagaagaggttttcaataacagggcttggaaatgaacgtagaaggggaaatagatcttttcagatgctgctttcccatgtaatacaagcgtttctacagggtaccagaggtgtgaaatatgtgacacttaagaacagtgatttttattgggaattttcttagggttattacacttaaagcaacaaccaactagtaacagctccaggaaaggggaatgaatcaactcttggttctttcctgaagacggcagtgttgtggataagtgagtttttaatgccctggcagtggctacatttgacactttagaaaaaataaacatatttaataatttttgtttctccttaggaataagactgtagaactgttttgtactgtgaattacggatgctct

SEQ ID NO: 1131 - DNA, 389 bp, Homo sapiens
caaatggttcttatttaggaaacacacacattattaccttagaaaatatttcattatatttgcaagctacataaaatagttcttgtatgtgtataatttattttatcctatcattctagaaaggattttaattgggtcttatttttaatgtatgtctatgtaatttccctacttataaaataaacttgtttattataggatagtattaactgaacaaaaggctgtataattttctgtacacatatgaatattttctaactcattttcattcatctcaactttagaatgtctcatttttcttgactaaaaaactctcagagccaacagttatgccctccaaaggaagcaatgcaggtgataataagtgaaaaaatgctgatacagaccct

SEQ ID NO: 1132 - DNA, 422 bp, Homo sapiens
cgttgctgtcgggcaactaaacctgtcctcttgaattacttcttcactgcgctttctgaggaaatgctgattggttactgctaaagattccactaacaattcaaattggggatctttgttcccatggcatgaaaatgcccatgcccgcatgcaaaaatgctgaaggtctgaaagacagattgttttgtggaaagtaaagagctctggtctggaagaaactgtttccctaaagcgtgttcgggtgtgatttgtgtggggggctgaaagctactgcatgaatcataacggctcattgaaatgtatggaccttggtttaaatccagggacccggctcccaaacacactcttgaaatgctgttgaaaactgttttataaagctaagaattgcacttcttgaggtataaaaaccaaacggaagttgg

SEQ ID NO: 1133 - DNA, 415 bp, Homo sapiens
ggcacgaggctgcagccgctggcccgaaaatgctgctcgggcgagcaggggtcaggcgggaaaagaagactccaaatccattctctgctcgcccccagggcaatgctgccaggagagggagtgggttcccccgcaggctatcccaccgatggggctgagagcttaatttggggttttatttgaattggagacattgttccctcttcgctcctctaccccataaaattccctacaaatgcaaaaattcgagatagaagaagccgtccctgaaagtaagttctgaaggattcctttcatgcggtgaaggaacaacaacaatattcaacttcaccttggtgtgtgagggtcgtcgtgttttaaaacactatccctgtagaaagattagtgaaatgtattggaagaagtagtggaaacg

SEQ ID NO: 1134 - DNA, 391 bp, Homo sapiens
ttgtctgtgggaatttcaacagaaggtaatacacaggcaaactacacttgaaggcaacatttctctctggctttccttttctacacagagagatattctaactgatttgcaagggtgcttctcagttggccggaatgagatattttcagatgaaagcctatgactctgtgtcactttcccccttatttttgaatctcatgtcttagttctgcaggcactgttatttttaattattattattatgcctgttgccaagctattccactttacacagagttgattagagacctgacaaatccaggccaacataaagtcctggcttccagatcagactacgtgaacaaagaaaaaaaagaaatctaccaaagtgccagcttttagaaagctctta

SEQ ID NO: 1135 - DNA, 391 bp, Homo sapiens
ttgctctggggctttccattttaaacctgacctttctggctctgggtttttccattttaaacctgacctttctggttccaggtgaaggcagagacagataaaataggattattgtatgtcagtatgttttcaactatttctcctgaaacttggaaacgtattagaccatgtgggataccacgcggacgggaacgggggataaatgtgtgttcatatatactcctccacaaatatacatgtctcaggctgggcgcagtggctcacgcctgtaattccagcactttgggaggccaaggccggcagatcacttgaggtcaggagtttgtgaccagcctggccaacatggtgaaaccctatctttactaaaaatacaaaaatgagccgggcgtgg

SEQ ID NO: 1136 - DNA, 432 bp, Homo sapiens
  misc_feature (1)...(432): n = A,T,C or G
ttcttttgcggatccctcgattcaattccgtgctgtcgcttttcattcctgattctttgtatgtgacttgtttttctcctcctttgcctttctctttggaggcctgtaggattttctttttgtccctggggttctataatttcacagtgatgttgtggggtggaaatctttctcattttttgagctgtgtctttgcttatcttttttccatttgggtaacaatctatatgttttgttgggagatcaaacaaatatcagtatctgcatgttttatctcttgggccaattggttttcttagagaagaacctcataatctgctcagggagttagtttaagaccagcatcattgtgggagcccagtggtggaagcaggaatgatgtcctcaccatttggtgtacaggttctcacataatgcctctgttctcagtcn

SEQ ID NO: 1137 - DNA, 387 bp, Homo sapiens
gtgatcaaaagaaatccccagtaattctgaaggccgcgtaaacagcgaacgaaaggagagagggaaaatgatcccggccgcctggaagcgagaggcagccacagacacactgttccggaaaccgcaggatgtaactggggagtcctggagagtgactagaaccggaaagggggcagacgctttgagggaggcaggcgggggaacaaacgggttgcagccagcaggctgggccgaggttccgggggacatttgtcctgggtgttgaagcaagctggctcctggccgcttacctagtatcctgtgaactctcacatggcatcgtcaggaacgaagcgcagccattcagtcaaagcggccggctggagaggcaacaagcaggtgcagctg

SEQ ID NO: 1138 - DNA, 421 bp, Homo sapiens
cgttgctgtcgcagagacagctccgtccctagtggagcgcaggggaggcagaagtcatgacaggcgaggtgggttctgaggttcacctagaaatcaatgacccaaacgtcatttcacaagaggaagcagatagtccttcagatagtggacagggcagctatgaaacaattggacccttgagtgaaggagattcagatgaagagatatttgtaagtaagaagttgaaaaacaggaaggttctacaagacagtgattccgaaacagaggacacaaatgcctctccagagaaaactacctatgacagtgccgaggaggaaaataaagagaatttatatgctgggaaaaatacaaaaatcaaaaggatttacaaaactgtggcagacagtgatgaaagttacatggaaaagtctttgtatcacga

SEQ ID NO: 1139 - DNA, 422 bp, Homo sapiens
cgttgctgtcgggagacggcgggagccgctgctctccggctgagggaatcagagacagctccgtccctagtggagcgcaggggaggcagaagtcatgacaggcgaggtgggttctgaggttcacctagaaatcaatgacccaaacgtcatttcacaagaggaagcagatagtccttcagatagtggacagggcagctatgaaacaattggacccttgagtgaaggagattcagatgaagagatatttgtaagtaagaagttgaaaaacaggaaggttctacaagacagtgattccgaaacagaggacacaaatgcctctccagagaaaactacctatgacagtgccgaggaggaaaataaagagaatttatatgctgggaaaaatacaaaaatcaaaaggatttacaaaactgtggcagaca

SEQ ID NO: 1140 - DNA, 419 bp, Homo sapiens
cgttggtggcggctgcggccggtttggcccttctttgtaggagagtttcatccgccctgaaatggtgccgagcgttaataactcctcaggtccctgcctgcacagggttttttcttaatttgttgcctaagagtacaccaaatgtgacatcctttcaccaatatagattacttcataccacattgtcaaggaaaggactagaagaattttttgatgacccaaaaaactgggggcaagaaaaagtaaaatctggagcagcatggacctgtcagcaactaaggaacaaaagtaatgaagatttacacaaactttggtatgtcttactgaaagaaagaaacatgcttctaaccctagagcaggaggccaagcggcagagattgccaatgccaagtccagagcggttagataaggtagtagag

SEQ ID NO: 1141 - DNA, 417 bp, Homo sapiens
cgttgctgtcggccggtttggcccttctttgtaggagagtttcatccgccctgaaatcttcccgagcggggtaactcctcaggtccctgcctgcacagggtttttttcttagtttgttgcctaagagtacaccaaatgtgacatcctttcaccaatatagattacttcataccacattgtcaaggaaaggactagaagaattttttgatgacccaaaaaactgggggcaagaaaaagtaaaatctggagcagcatggacctgtcagcaactaaggaacaaaagtaatgaagatttacacaaactttggtatgtcttactgaaagaaagaaacatgcttctaaccctagagcaggaggccaagcggcagagattgccaatgccaagtccagagcggttagataaggtagtagattcca

SEQ ID NO: 1142 - DNA, 429 bp, Homo sapiens
  misc_feature (1)...(429): n = A,T,C or G
atatccctcattcgaaggtggnnggggtncanaacaacccctttcatgttggaaaggaagctcatcaaacgagctctgggaaagggggcattattcacagagagaaacgacagcatcgtaaacgtgataaggtgctgactgattctggttcattggattcaactatccctgggatacaaaataccatcacagttaccaccgagcaacttacaaccgcatcatttcctgttggttccaagaaaaataaaggtgattctcatctaaatgttcaagttagcaactttaaatctggaaaaggagattctacacttcaggtttcttcaggattgaatgaaaacctcactgtcaatggaggaggctggaatgaaaagtctgtaaaactctcctcacagatcagtgcaggtgaggagaagtggaactccgtttcan

SEQ ID NO: 1143 - DNA, 435 bp, Homo sapiens
  misc_feature (1)...(435): n = A,T,C or G
tcgattcgaattccgttgctgtcggcagctgcctgaggacccagggcaaggcagcagctccgtggagtttgacatggtcaagctggtggactccatgggctgggagctggcctctgtgcggcgggctctctgccagctgcagtgggaccacgagcccaggacaggtgtgcggcgtgggacaggggtgcttgtggagttcagtgagctggccttccaccttcgcagcccgggggacctgaccgctgaggagaaggaccagatatgtgacttcctctatggccgtgtgcaggcccgggagcgccaggccctggcccgtctgcgcagaaccttccaggcctttcacagcgtagccttccccagctgcgggccctgcctggagcancaggatgaggagcgcagcaccaggctcaaggacctgctcgggcggtactttgg

SEQ ID NO: 1144 - DNA, 425 bp, Homo sapiens
cgattcgaattccgttgctgtcggcagtgcaaaacagttcacgccatgatggaaaggaagttgatgaaggagcctgggaaactaaaattagtcacagagagaaacgacagcagcgtaaacgtgataaggtgctgactgattctggttcattggattcaactatccctgggatagaaaataccatcacagttaccaccgagcaacttacaaccgcatcatttcctgttggttccaagaagaataaaggtgattctcatctaaatgttcaagttagcaactttaaatctggaaaaggagattctacacttcaggtttcttcaggattgaatgaaaacctcactgtcaatggaggaggctggaatgaaaagtctgtaaaactctcctcacagatcagtgcaggtgaggagaagtggaactccgtttca

SEQ ID NO: 1145 - DNA, 397 bp, Homo sapiens
cgttgctgtcggttcaggtcactgattgtttggaaagcctgataaactgccacggccacgaggagtctaaggacacatccaatttccattcgcatccaaaatggaatccgagacagaaagaggaccttagccttcatatctgtttttttcttatgaagcttcttctgggtggaaacttgtcaaatttcatcaggtaagaagtgctaaagtgaacctgtaaactttgtttcaaaaaacaaaaaccgaagtttaagaaatctaaagatggtgtcagccttagacagatctctggactgtaatctgggaaaggtcaaataagatctccaatcgtgtacaattccaaatacatttgagagcagtgggtctgaaaatgtggttcccagaccagcagcatcaa

SEQ ID NO: 1146 - DNA, 391 bp, Homo sapiens
cgttgctgtcgatcatttcatggaaatatattttcttcacatttgggccccaacagcacaggtgttgctatatttttgtggtgaggaactgagacccagggaagtcacggtactttgcccaaagtcaccccgatgtcaagcgttagagcaagaatttgaaccccagagcttaactcttaaccattttgctaactggctgtctctccaggcccccatcaccctttccatcaccctcccctgccccaggggcatcctatcaaatggcagttcccccctcgcttgcctcagcatctccaatttagagcttcatggatctcctcctgttgaagtcatgggatggatttcccatctcagaaactgcacaagaaacaaccttggagttttgaacaag

SEQ ID NO: 1147 - DNA, 396 bp, Homo sapiens
  misc_feature (1)...(396): n = A,T,C or G
ggcacgagggctgctccagcagcttggattcagagtgagaaggcataaaggagaatgcccagctgacttgtgcagtggttaattgaaattattcaggcaagagatgatggtgtcttggaccaggggatgaggaaggctacaaaatgtgtctacctgtattctgtgaggagaacgtgttccctggttttagatactgtgaagatggatcaggagagagtttatctagactgttggggaaaggtgttgcgattccttcagctacacaggattgaaaggagacatttctgaaggggaaaaaggaaatgaaagaaaagatgtttcagattgaggatatgctgtgtggtgaacttgttcttcactctgttagggttcacaaatgactcttcactgccctcn

SEQ ID NO: 1148 - DNA, 401 bp, Homo sapiens
ggcacgagggacattgaagcaacactcagcgttgcctagcgttaaaggcactgcagagaaatgaggtgcagaggtggcccctctgagtatttatttgactcaggtaccagtggtacatatatacagtgtaattatgaccaggctggtaaaattggctgctcgcaaacaatccccttttttcctggcagtatttggaatttatcatttattaataactatacatttttaaaggcagaagaagaaaatctatctatcatctatctatctatctatctatctatctatctatctatctatctatctatctaaatgacctgacagaagaaaactgttaaaaatggatattattggaggggatttaaaacagtgggtgtgaattatcattctgatggaaagaaaat

SEQ ID NO: 1149 - DNA, 394 bp, Homo sapiens
  misc_feature (1)...(394): n = A,T,C or G
cgttgctgtcggtataagagcttttcaagatatttctcgatttctgtaagcactggataattaattcaagaccctcccactttctttgtaggaatagatgaggcaataattttatgactataactgaattttttcacacaagaccttgagatttggtagaaaataggatctgtttgatctgcttgcctcggcctcccaaagtgctgggattacaggcgtgagccaccacgcctggcccttttactgttctataaaataagaagaataaaaggggtatttgaggtacatgcatttgaagttcttagaatgagacctagcatgtaggaaacactcattgttagttgctcctgctattaatagtagtaaataggtcaacatgactcagttaacattn

SEQ ID NO: 1150 - DNA, 370 bp, Homo sapiens
atacacttcgtcatttttttttctctgacagactcagcaagaccaattatattatctaagaactaaccaaggaggtgtatagtttagaagagtcaagaaaaacaggtaaaatatagcaaatatgtaaaacaaaagaaaagccactaaaatgcaaatttctgcctaagtattatatgttatatgctagagaacacagataatcatttgaccaagtaggaaggaaaacaagaaaatgaaaaaagtggaaagaagagaaagtttgtaaatgaaaaaagtttcaaatgctgagtttctaaagaactgagaaaaaaaattagaaacagtgattactaaagaggataaaattttttataaaccatgacattttgca

SEQ ID NO: 1151 - DNA, 375 bp, Homo sapiens
agttcttaatttttaaatttgaagtcaggttttagcatctttaagtttattggctgttttataaatgtattattttccctgtgaaactcctatttgaatcttttatacccccaccccctgtcctttttccccttgtatctttttaaaaaattgatttataaaagcacttgtgaggctgaggtgagtggagcacttgaggtcaggagttctagaccagcctggccaacatggtgaaaccccatccctacgaaaaatacaaaagttagctgggtattgtggagtgcgcctgtaatcccagctacttgtgagactgaagtgagacaattgcttgagcccgggaggcagaggttgcaaagaactcttattgcactccag

SEQ ID NO: 1152 - DNA, 371 bp, Homo sapiens
tttcatttcctgtgtggaaaacaattaagcttataattttgcgttttacagaaacagaatcacttaacttctgaaaggagaaattaatcctaattaaatgaggctgcttttttaaaatccagatattatatactggattgctttggagaaaattttgttttataccagtacctaaatagcttttaagagttcaggttaacctatgctgaggaaattaatagcaaaaagaaaaggccacaatcaagacggaaaggatttaagttttattaatgattattaagtgcattatttatagtagaatccccaacatatgctcacgaaaataaaccagttctaataaatacatgataaagatcacaaaattagaagag

SEQ ID NO: 1153 - DNA, 298 bp, Homo sapiens
  misc_feature (1)...(298): n = A,T,C or G
gatatatgtatttatgtctaaaaatggtgacctttaattttaattggggggttggaaagagacagttgaacttaaacacacataaattattcacttctcatcctattacttatcctatccaccttaggtgaagagtaagcgtaagtatttttttcttanatgctaagcactggatgaaagtcctctgacaatcacaacactatttgtcaatacagtagtaaacatttgtttcagatttaaaaaagtcatttatttcccttgcttataaaataggagtcaagagttatctggctgtact

SEQ ID NO: 1154 - DNA, 381 bp, Homo sapiens
ttctagagcacgcaacctagatccctcacatgtgcagttcacaatagggttcacactcctatgacaacctaatgctgccgctgatctcacaggaggcggaactcaggtgggtaatgctcgctggcccaccgttcgcatcctgttgcacagtccagttcctaacaggccacggaccagctgaggacccctgctctagagaatcgccaaatgtgagggtggtcatgaaagtttcaaacaggtgttaaaggcaaagtgatataaaagaatcatcactgcagttttaaagagtcctataaggaagaactctcatctttttctcttgatcaaattcactttcagaccaaagaaacatgcatatagaatttaagcagaatactgtga

SEQ ID NO: 1155 - DNA, 394 bp, Homo sapiens
cgttgctgtcgagcgaatcacctgaggtcaggagttcgagaccaacctggccaacatgttgaaaccctgtctctactaaaaatacagaaattagccgggcatgatggtgggcatctgtagtcccatctacttgggaggctgaggcaggagaagagcttgaacccgggaagcagaggttgcagtgagccaagatcgcgccaccgcactccagcctgggcgacaaagcgagactctgtccccctcccaaaaaaaaaactggcatgtttcatttattagatgtttattttttcaacttcgctttttagaagtcatttagttagggtcattctaaagggtgaagtattgagatttaatacagagaagtctctgaaaatgtttgggccattgtatatta

SEQ ID NO: 1156 - DNA, 373 bp, Homo sapiens
agccctactcctggggtgggagggggctgtaaatgggaattaaagtgttcaaatgagactaaccgtaggggtgaagaaggtgtgagaaaggaaaccagagcttggcttactgcttaaagtcaggaagcgaaactagctagtcttccctataaagatagcttaaagcaaaacaaaactagcacaaatatattgctagccaccatggccaataactgaattaggccagttattggttcagtggatacatctgtgagatccttaatattgctgaagaacagaagcacagaaaccaccagagaagacttatgtaagaatggggatagaggtttaaatcccatgggtggcaggcagcaggcactcacaaacacacacg

SEQ ID NO: 1157 - DNA, 369 bp, Homo sapiens
gcctcaagcagtcctcctgccttgacctccaaaagtgctgggattacaagcatcagccactacacctagccaaaatcttcattttagtacgatccaagggtagtttgtatgatatatccattaaagtttgagatacacttgtctataattttcctcaaatcatgaaatgaaactgaccacaaaattttcaaaaccactgagaaaatttttttcaatgtgtgatctagaatagcttacacggcagttctaattattttgtttgtttacactattttaaagaaaagttcggccgggcacagtggctcacgcctgtaatcccagcactttgggaggctgaggcgggtggatcacgaggtcaggagatcgaga

SEQ ID NO: 1158 - DNA, 235 bp, Homo sapiens
ccacccagagctggtgtctacatccttcagccctgacttccacgggtgccactagccccagaaaacgcaacgcgcctcaggttgaaatcctcctcctctgaaatctatgagcctccgcccccttctcagagacgttccaagcctccactggccccttcaccctctcgtttaagggcaccacattctggcccggcgcggtggctcacccctgtaatcccagcactttgggaggccg

SEQ ID NO: 1159 - DNA, 378 bp, Homo sapiens
aaaatggagacaggcacactagcttcctcacagtagtagctgtaaaatttacgtgaagtaacttatgctaactcatggcataatacttggcatatagtatacaatgactaattttaactactactattataaatatctttattttatttttttgagacagaatggtgctctgtccctctgtcgccgagatctgtagtgaccccatctcttgctttgagtggggcgtcccaagaattataggaacagggctgatgggcatttcagccacaacaatgtccttgacaacaaaaaaaagatcgtgcttcaacaacagaaatgcaatgtttcttttatcacttttcagtgtgatcacagtcattggcgctctggattgcatgg

SEQ ID NO: 1160 - DNA, 404 bp, Homo sapiens
cgttgctgtcgggaaaagaggcctgtttgtcaattgtacaaccgattgtgaagctctagtgtgaatatttttacgtctgtattagacattttctttgcaaatctattgttcgattgaaatgtaaatgaaattaaagatggtgtacacccatcatgtaaaaagcaggcaccatctctaagatggatttaatgctcatttttaaggcatatactcagcttctatttaaaactataatttaaaataattctgtacaatgaaatggggaatatatatgggaataaattctattccatttatttcaatttgaatttccaaattgtaatgtttccctttgtgctataggaataggattaaatgggggaagactaggatttataaggcctgtatatggggggagggcagag

SEQ ID NO: 1161 - DNA, 402 bp, Homo sapiens
cgttgctgtcggttgaagatatgaaatatggctatttttaatggtgacaattatgacttttagtcactattaaattggggttacctatatcagtacaatttgtagttgtttccaggtttggctaataatcattccttaacctagaattcagatgatcctggaattaaggcaggtcagaggactgtaatgatagaattaaattagtgtcactaaaaactgtcccaaagtgctgcttcctaataggaattcattaacctaaaacaagatgttactattatatcgatagactatgaatgctatttctagaaaaagtctagtgccaaatttgtcttattaaataaaaacaatgtaggagcagcttttcttctagtttgatgtcatttaagaattactaacacagtg

SEQ ID NO: 1162 - DNA, 400 bp, Homo sapiens
cgttgctgtcggtcttgctgtaagagaagaacaactgatttttctgatttcttaagcattgtaggctgttcaaatggtagacataatagtgagaagccacctgagccagtcaaacctgaagtcaagactactgagaagaaggagctatgtgaattaaaacccaaatttcaggaacacatcattcaagcccctaagccagtagaagcaatatgaagaccaagcccagatgaaccaatgacgaatttggaattaaaaatatctggctccctaaaacaagcacttgataaacttaaactgtcatcagggaatgaggaaaataagaaagaagaagacaatgatgaaattaagattgggacctcctgtaagaatggagggtgttcaaagacataccagggtctag

SEQ ID NO: 1163 - DNA, 402 bp, Homo sapiens
ggcacgaggccgcacttctgcctgctgtttgcatttctcctggactaagctgctcttgttaatcacatggatgttggcacagctgatgcacttgtccttcattactgtggattatggaatttattggcattggggagcaacaaggtgagagcccttgaagatgactcaagaattcagcctggctcctgactaggaggatggtgattctaataatgaagagaatggggaagaagatggagttttgtgaaagagaggaaattgtgattggttaaggcatctgagccagcctggctgtcaagtatgagaaatgaggacatgatttctggaaacagcatcccaaagatgccgtttgcaggggaacctctactcagcacaaagcatttgagaagggctggttacttg

SEQ ID NO: 1164 - DNA, 373 bp, Homo sapiens
ggattaggatcagaatggttttgtgcttctcaacagccaaattagaatttagaaacaatagagctataggccttcaaattctaaggaggaatgatcgccaacctaacatttgatacttgttcacagaatcaaatggatgtgacacgggaataaagacattgatagatacacacattctcaaaaccatttccttcccacatacctcttcttaggaagtgactggacgatgagttccatgaaaataaggtataaacaacgaaagatgaaaagatacggtataggaaactgggagcaaatggaattatcataaccttgaagggagacccccccaggacagtgtgggttccatataataaggggttgggcctccgtc

SEQ ID NO: 1165 - DNA, 397 bp, Homo sapiens
ggcacgaggagaacttgtttcataaatggatatccctactatgactgtgaaaacatgtcaagtgtcacattagtgtcacagacagaaagcacacacctatgcaatatggcttatctatatttatttgtaaaaatccaagcatagtttaaaatatgatgtcgatattactagtcttgagtttctaagagggttctttatgttataccaggtaagtgtataaaagagattaagtgcttttttttcatcacttgattattttctttaaaatcagctattacaggatatttttttattttatacatgctgttttttaattaaaatataatcactggaagttactaatttgattttataaggtttggagcattacagaataactaaactgggatttataaag

SEQ ID NO: 1166 - DNA, 367 bp, Homo sapiens
atctcttccaagtatctttcaatcataattacctattatattcaagacactgtgctaagtactgtacacagcatttcctaaccagtgtcccaggcagggcttggccagctagagtcctagaccactagtctcagtctggaccatttcccgcagtgtgcttcaaagattccgtgtgtgtgccatgatatgaaaaaagtacctgccctcaaagaacttacaatccagtaaaaagaataagtacccaaatcactgtaataaaaggtagtataaggccgggcgcagtggctcacacctgtaactcagtactttgagaggccaagacaggcagatcacctgaggtcaggagtttgaaaacatcctggccagc

SEQ ID NO: 1167 - DNA, 409 bp, Homo sapiens
cgttgctgtcggttcatttgctttagtcttagcgctttaaagaagtgtcataatgttctacaaagacacaaagcttcaggcttatacaaaactgagtatgattagaaatacctgagcccagaaatgattctgagaaaagagaataatttgaagacacttattttaaagtaattatggttagaaatgaattaatttaaacatgtgttcacatatccctttctctaacagtttaacctagacaaacatctgtatcagtatttttttattcccctgattgattacatttggtttctttattctgagaggagaataacaaaaacttcagaaattcctaagggtgtaataagaaagtgggttttgagtttcctttcctggaattattttacagttctttggtgggtctcgtcag

SEQ ID NO: 1168 - DNA, 405 bp, Homo sapiens
cgttgctgtcgatggatttaaacattatagctggagtggggctggaaatctttgtaaaggaagttctttcagtaagatgcccctgcttgtctttgtctcttttttgtttaacaaggtaactttttgtttaacaaggtaactttttgtttaacctagattttttttaaaactttttttttttttcttatggaaaaagtatttctttttcagtaaaggaaacctgcccaaaccaaacccaaaattaaaaaattaaaaatattctctatccctactacctaaaaaaaaacccttttaatatttgggccggttccctgccaaggggttttttgggaatacaggagaatttgggtggtttttaaacaaaacaaggggaacattctgaacatactggcttatagtagggcg

SEQ ID NO: 1169 - DNA, 404 bp, Homo sapiens
  misc_feature (1)...(404): n = A,T,C or G
cacattccgttgctgtccaaaagttgtacaaaaagtgatttcatatttggtttataagcatttatatgtgggggttatttggtcttttgctttttccatcttaaatatcatcatggctaaaacttaagggtatttatagtttaattccatttcagttttatagagggcagtaattattctgatgaatgttgaattaagaaatggatattttctttctctgttgtgcagntattggtagatcaatttcttataacccacaatgtagcatcaataattgatagcatgtattttatttaattacttgaattatttagacttgatttctctaattttttccataaaaggactgaacagcacctacttgtggtctggacagcttaacccaaagttcctggaagaataan

SEQ ID NO: 1170 - DNA, 402 bp, Homo sapiens
cgttgctgtcgtgaagactggatatcaaatatctgtttttagcatcctatagtctgcacatggtaaatacaacttgtgtacttagctcttcagaccacagccctaattttcattttcttgtctttatcatattagaactactaagcagatttccaaaaacaatccatgagatgaagttagagggatagaaggaggacaatctgaaaaatatgaagtgattaaaaaacattgttctagctagttgctcacattcaaaaaaaatgttaaaacccaattagaaacaaaagtcatagaaaatgtgagcatattgtgttccttaaataaccagatgttctttccttcctgaaggcagtaagggctaggaaaaaaggtttaaaactattgttttaagttaacggtgag

SEQ ID NO: 1171 - DNA, 398 bp, Homo sapiens
gcacgagggcatttgtttaatttatactggttacttatttacgggggaggggacatgaaggtaggtaaataggtaggcctctaattgaaccacctctctaagttatgtacgtatatataagctgaaattgtgtttgacattctgagggttttctttttctttttcctttttttttttttgggggggggccggggggaaaaactttttttttaaccccgggctgaatacccacgctaataatcaaatataaatgagccctcgccttttgaaataaaggagattccccggccaaactttttggagaactggaaaaaaaagggccccccacccacccccttatattttgtttttaaagaagagggaagtttcccctttgaggcccaggccggtcttaaccg

SEQ ID NO: 1172 - DNA, 400 bp, Homo sapiens
tcccactcgattcgaattccgttgctgccgatgtggcttttatttgtactgctcatatccactgtacagccacttgggagtatcgtgcgtagcttgcagcaactgctgactgcatttatactggttattgcatattcttttccctggaagcgaaagagaaatgtttttcttgttgcattgattacattttataaatttgcttaactggaaagtttgggaaaagaagcctgtttgtcaattgtacaaccgattgtgaagctctagtgtgaatatttttacgtctgtattaaacattttctttgcaaatctattgttcgattgaaatgtaaatgaaattaaagatggtgtacacccatcatgtaaaaagcaggcaccatctcttagatggatttaacgctcc

SEQ ID NO: 1173 - DNA, 397 bp, Homo sapiens
cgttgctgtcggtcttgctgtaagagaataacaactgatttttctgacttcttaagcattgtaggctgttcaaaaggtagacataatagtgagaagccacctgagccagtccaacctgaagtcatggactactgagaagaaggagctatgtgaattaaaacccaaatttcaggaacacatgattcaagcccctaagccagtcaaagcaatatgaagaccgagcccagatgaaccaatgacaaatttggaattaaaaatatctgcctccctaaaacaagcacttgataaacttagactgtcatcagggaatgaagatcataagaaagaagaagaccatgatgaagttaagattgggacctcatgtaagaatggtgggtgtgcaaagacataccagggg

SEQ ID NO: 1174 - DNA, 369 bp, Homo sapiens
tactcatataatcttcattacaaccatcttagtaacctgtagttacaagaaaaacaaaaatgttaagttgtaggaatcatattctccaaattattttacattaaagaccactgacaaaggaatcactagagatgttattccactatcaccaaatagtatattgttaccatctgttaacctacaaccttgggtaagatgggataagttaacatcagttgcaacatacacattcaatgtaaaatagctttaacacaataacaactattttggtttattgaaacaagttcacacattgtcattaaaaaggcattttgaattcactgtatttttattaccttaattctgttgaacatgggaaagagcctggtc

SEQ ID NO: 1175 - DNA, 405 bp, Homo sapiens
tcgaattccgttgctgtcggtctccttgaaaagttgatggtcctgcagccgcacaggcagttgtgggcatggtgggcgctgagtctggaggttgttcaaggccagcagcgttgcccggagccctgctgctgacgctgccgtcactggttctagctctcacattctcagctgcacgtttctgtttccacctcagtaaacgcaaactcttgttcataggcacagctgtcactgcagcacacaaggactcaggtttgtaaagacaaacgattgatttgtgtgtgacgtgctgcttgtttgcactggattttgcaaattatttactaaagaaaagtacttcagaccttttgtggcagacaataaatacagcgatactctaatcttcagtattcataaaaatgggtgaag

SEQ ID NO: 1176 - DNA, 408 bp, Homo sapiens
tcccatcgattcgtttgacatagagtgaatgcattttcccctctcctcctccctgctaccattatattttggggttatgttttgcttctttaagatagaaatcccagttctctaatttggttttcttctttgggaaaccaaacatacaaatgaatcagtatcaattagggcctggggtagagagacagaaacttgagagaagagaagttagtgattccctctctttctagtttggtaggaatcaccctgaagacctagtcctcaatttaattgtgtgggtttttaattttcctagaatgaagggactgaaacaatgagaaagaatacagcacaacccttggacaaaatggaattagaaaatatatttaggtttatagcagaagcaagttcaattggttggttggaaag

SEQ ID NO: 1177 - DNA, 369 bp, Homo sapiens
aggcccagagtcgggggaagttttgtgagagaagccacattagagaccagaggagaagtaccaatttgggatgaccttctaccaaagacctcaccgatttcaaggacagctcagctgttcctatcctctttccctcattgcactgttttctgtttatatttatatatacatttgtaattacttgactaatatctgcacacattgcctgctctaagctcttcagcatcagtcttttttatcattttgtcccacagtgtttgacaagcaatagttactcaataaatatcatttgaatgaatgaatgaaccagtaaacgaagtgacatttgaatatgcaagaaacccctaagtttgagaatcctgttggcag

SEQ ID NO: 1178 - DNA, 363 bp, Homo sapiens
gacagataggagaaagctatcatatattatgttctgtagaatgcttcttttggtggcatcagaagaaatgacccatgtttgaagatctgaatttaattaagtctacacagaatatagtttaaaggcgtgaagactttgctattagtataataaatactttttcttaagacattgtttatctacagaaggactaccatattcaagatttaaaggtagattgtttttgttcacatcattttgatcttaggttttgctggaagcattcacattaagggggcctttaatttatgtatgctttaagaatacttaatagctaatctacatattaaaaaaaaaaataccggcctaggctcggtggcttaa

SEQ ID NO: 1179 - DNA, 361 bp, Homo sapiens
gaggattgtaacagggaaagcatttagggttttcaggcagaggaacagttggccaaggaagtcagcttctcagagctcaagagtagatctgagtttaactcattaaagatggcatggaagagcagtgtcataatgcaaatgggaagatttcttctcttagtaattttatttctgccacgtgagatgacaagttctgttttaactgtgaatggtaaaactgagaactatatcctggatactacacctggctcccaagcatctctgatatgtgctgttcaaaaccacaccagagaggaagaactgctctggtaccgagaggaggggagagtggatttgaaatctggaaacaaaatcaattccc

SEQ ID NO: 1180 - DNA, 369 bp, Homo sapiens
cacatgcaacagaaaggcacagttttatttcaaacaaagcagtgttttgctgtaacaccgttaaaaactggaaaggaaaactcaatcaaaccaaaaactagatgcttaggaataaatggtagaattcttacaaaaccaccacgcttcaattcaatctaaatcaattcaacaaatctgtgctgaaagtataacatttagttttcttagacaccaaatgaacaatacaaaatccctcaagggacttagaacattcaagttttctatatctgtggttctaagtctgttaccaacttccaggactctgcttctttccctctgcccattaacaatgcggggttaaaagtgacttcctaccactatgtttcttac

SEQ ID NO: 1181 - DNA, 407 bp, Homo sapiens
  misc_feature (1)...(407): n = A,T,C or G
ggcacgagggtggctgcagccgctggcccgaaaatgctgctcgggcgagcaggggtcaggcgggaaaagaagactccaaatccactctctgctcgcccccagggcaatgctgccaggagagggagtgggttcccccgcaggctatcccaccgatggggctgagagcttaatttggggttttatttgaattggagacattgttccctcttcgctcctctaccccataaaattccctacaaatgcaaaaattcgagatagaagaagccgtccctgaaagtaagttctgaaggattcctttcatgcggtgaaggaacaacaacaatattcaacttcaccttggtgtgtgagggtcgtcgtgttttaaaacactatccctgtagaaagattagtgaaatgtattggaagan

SEQ ID NO: 1182 - DNA, 411 bp, Homo sapiens
  misc_feature (1)...(411): n = A,T,C or G
cgttgctgtcggaaaaaggtggggggaccaggggaagactcggagtgcgatggcggcgcaaattccaattgtggccaccacttccactcccggaatagtccggaacagcaagaagaggccggccagcccttcccacaatggcagcagcggcgggggctatggcgccagtaagaagaaaaaagcgtccgcttccagctttgcgcagggtatcagcatggaagccatgagtgagaataaaatggtgccctctgagtttagcacaggacctgtggaaaaagctgccaaacctttgccatttaaggatcccaactttgtgcactctggccacggtggcgcagtagctggcaagaagaacagaacctggaagaacctgaaacaaatcctcgcttctgaaagggcattgccgtggcn

SEQ ID NO: 1183 - DNA, 404 bp, Homo sapiens
  misc_feature (1)...(404): n = A,T,C or G
ggcacgagggtggctgcagccgctggcccgaaaatgctgctcgggcgagcaggggtcaggcgggaaaagaagactccaaatccactctctgctcgcccccagggcaatgctgccaggagagggagtgggttcccccgcaggctatcccaccgatggggctgagagcttaatttggggttttatttgaattggagacattgttccctcttcgctcctctaccccataaaattccctacaaatgcaaaaattcgagatagaagaagccgtccctgaaagtaagttctgaaggattcctttcatgcggtgaaggaacaacaacaatattcaacttcaccttggtgtgtgagggtcgtcgtgttttaaaacactatccctgtagaaagattagtgaaatgtattggan

SEQ ID NO: 1184 - DNA, 403 bp, Homo sapiens
ggcacgagccccagctgacttgtgcagtggttaattgaaattattcaggcaagagatgatggtgtcttggaccaggggatgaggaaggctacaaaatgtgtctacctgtattctgtgaggagaacgtgttccctggttttagatactgtgaagatggatcaggagagagtttatctagactgttggggaaaggtgttgcgattccttcagctacacaggattgaaaggagacatttctgaaggggaaaaaggaaatgaaagaaaagatgtttcagattgaggatatgctgtgtggtgaacttgttcttcactctgtagggttcacaaatgactcttcactgccctcttggatgaaataaactggttcccatagaaatggaccgtctctgatttcacagtctaa

SEQ ID NO: 1185 - DNA, 394 bp, Homo sapiens
  misc_feature (1)...(394): n = A,T,C or G
gcgttgcggtcgcaggatgattctgaggatgactacggtgaatttctggatcttgggccggctgggggctctgaattcactaagccaagtggccaaacagaaagagaacccaagcctggaccgagtcataaccaagcagcaaatgacattgtcaaccccagatcagagcagaaagtcatcatcttggaagaaggtagccttctttacacagaaagcgatcctttggaaactcagaaccagtcatccgaagactcagagacagagctgttatcaaatctaggagagtcagctgctctagcagatgatcaggccatcgaagaagactgctgggtagatcatccttacttccagtctctgaaccaacagccccgtgaaataacaaaccaggtcgttn

SEQ ID NO: 1186 - DNA, 385 bp, Homo sapiens
  misc_feature (1)...(385): n = A,T,C or G
ttccttccttctctctagcatcatattctcagaaattcttcctgtgttgctccattccagttcttataagtgattgttgcatgtggttttgtctagatttatctgtttttggtggaagagttattttaatacaagctgcactggaactgacttttgaattgaaacctctttccatgcttggttcaaaccaatccctatacgtaatggttatgagcccagagttggagccagggtcctgaattcccacctctgacactntctggctcttaatctctgactatttgcttaacatctatgtgcctccatttctatataacggtttttacgggttttatttattaaacaaatggggatacccggaccccgcgtgacacctggtcaatcg

SEQ ID NO: 1187 - DNA, 365 bp, Homo sapiens
atttcctttgtgtttttctgtaatttacagattttttttcctcagtgagcaagtattacttttataaaccgaaaaaaccctgtatttttcatcgagtatttaattaacttatgaagaaggttattcattgtggcattgtttgagtataaaataacgaagtccaacaacagaagacgggttaaataaatcatgttatgtccatgctgtgaaaactatgcaactgtttaaaaaaatgagacacatctatatgtaccattatggaagaatcccaaactataaggatccactgaaaaacaaaaggaaaaaaaagatgaacaaccactttggaaagcagtttggcatgatttactgaagtcaaaggtatg

SEQ ID NO: 1188 - DNA, 362 bp, Homo sapiens
  misc_feature (1)...(362): n = A,T,C or G
aagccctgtggctgggtaaaaatacaaaattagctgggcgtggtggcacatgcctataatcccagctactcgggaggctgagacaggagaatcacttgaacccgggaggcagaggttgcggtgagccaagatcacgccattgcactccagcctgggcaacaagagcaaaactccatctcanattaaatgcgaggcaaataaaagaggggggcggttttttctcgaatgcccaggttgaaaaaaactttttgggggcgcgcgcccaccccccttgtttgttgaggaaaaaaaagggctttctttgacaattgtgtggcccgtgagggcttctggggccccccctataaataatagcccctacc

SEQ ID NO: 1189 - DNA, 366 bp, Homo sapiens
cctgccctcctccacctgacacccccaaccaggcctggggctcggtgcctccagctccaagtcctcccctctccaacagccacttaaaggcctccctctggctcttctcagagaagaaaatcacaacaaggagagagggaggaaaggcagtacttcagggcatggattcaaatctgcatgtaggagatggaaaagcaaggtacgagatgggcagagacacaggaagagcaggagatgtagggtgtggccttatcacttgctgggaggtaggggtgggacaactgagtgaggagctggcttatagagcagactgtggagtttagtcctgatggaggtttctgaaagagacatgggggtggtgggtgc

SEQ ID NO: 1190 - DNA, 391 bp, Homo sapiens
ctgcggacctgtgacccggcgacttggggccctgatgtctggattctttctccgatactgagacacggcgcgtaggtccacaggcactatccaactggaagttgaattgtgagtgagagtgaacaggaaccttccggcttccggagggttgtgtggccagtgactcaaagtgagaaggccctcgaagtcgtcttacgtctcatgcggcgcctcgcccatggtccttcttgtctcgcctcggtcataactaaggaggaacgagggccgaggagtgtaagggctcactcgaagcttgggtgctgtttgcggtatccgaatcccactagcacctggaaccccgactgaagactctgcactccccacacggaaccaggagaggtacgccatgacg

SEQ ID NO: 1191 - DNA, 375 bp, Homo sapiens
  misc_feature (1)...(375): n = A,T,C or G
ggaagaaagagcttcctgcaattcaaggactgtacaaagctgaaacgcagagattttcatattatttgggagactcagaaatgagcttttaaggttgttccttgacttgcgggtcataagcgcacaatggtgaagaaaaggctgccttctagtgacacggtgttccggtttgagactccgggcagcccaaggaaggccaacgtggaggcctcacgcagctccacagacagccccagctcggtgttcctcagctcagaggctgagaatggtgtggaggagaaaaagaaagcctgcaggtcgccaacagcccaatcccctaccccatctgtggaggcggactcctcagaccagaagaanatcattagcctatggtcn

SEQ ID NO: 1192 - DNA, 394 bp, Homo sapiens
cgttgctgtcggtcacccccctcaggagccactcccagggccctgtggccattcccagcctcctctgcaggcaccgagtgagcagcgctgggattctgggactggagagggccctgggaaccctccaggcctgccccctggtgggtgagcctggttctggggcctcccggagaattttttttttcctggaaaagagggagggtaggggtggagcgtgacacctgggcaggtgtcccttgtctccatcctggccctgcatgctgttaactcaggtggtgtggctgcccgagcctgggcacagccaccgcttccaggtgctgagtgtggccaccgacgggaaggtgctactctggcagggcatcggggtaggccagctgcagctcacagagggctg

SEQ ID NO: 1193 - DNA, 395 bp, Homo sapiens
gagcatattatcaaggtaaaatgcagcgtgaatagtacctgacaattttgaaagctgttaaagtccttcaggcaagttttagaggagtaagagttagacggactcttagaaagatgcagactgcagcaacactcattcagtcaaactacagaagatacagacagcaaacatactttaataagttaaagaaaataacaaaaacagtacagcaaagatactgggcaatgaaagaaagaaacatacaatttcaaaggtataacaaactgaggcattctgtaatatacattcaggctatttttaggggaaagaaagctagaagacatttaaaaatgatgcatatagccgcaactctcattcagaggagatttagaactctaatgatgagaagaagattg

SEQ ID NO: 1194 - DNA, 408 bp, Homo sapiens
cgattcgatgggtggtccggcatcctcagggggtgtgtgttgtgtggggggtctctgagctgaacttgggtggggtggggacttgttcctcgggggccacctttgtgtccttgtcagcggtcgtcctgctgtggcctgggttgcatttcctcttggggggggtattgaggacccccagcctggaatgagaagggtccccggctccatgtcagaacccagaaaggtggatccccccactgttgactgcatgaagtttttggtaccccccttttggtccagaacccgtctgcctttcccttggggacaagggggccttttgatggcactggttgtgacctggacccagccccgcgctggcatgatccagaaatggggcccggacatccttgcgggcaggaggcaccgtcc

SEQ ID NO: 1195 - DNA, 362 bp, Homo sapiens
agatcagaataagagtctctaggttatctgctcaacagaagctaagaccactctgatagtcattataacagtttttctttagttacttccataattagatttgtttttttaaaaagcttccccccgctgacttttctttaaacatggttttaaaggatgtgatcaatttagtaatgaggaagttgttgaaggatgtctggggttaagaagctgaaagctgacagattcagtgtaatccctttccccacaggggctgctggagtcctctgcagagaaggcccctgtgtcggtgtcctgtggaggtgagagccccctggatggtatctgcctcaacgaatcagaacagacagtcgcgcttttct

SEQ ID NO: 1196 - DNA, 388 bp, Homo sapiens
cgttgctgtcggaacacgcggctagaaatcatctaccccaggaatttttttttttttttttttgggggcagttgggaaaaaaaaaatggttaaataaaaaagggttttgttggggttgcccggaaaaacggttatttttctccctatggggaaactgggggagtacgctaaaattttgcgaaccggggttgggttaaaccccccccaccggcctcttttgcgggttaaaattggaagaggggggaaaaggtttccttttatggggggaaaaattggatttatagtcaaaagggggcctatttttctgcctgagaaaaaaacccccccgagggccaagggggtccctggataaccccccggaaccaaaaaggaaagggggcgcttcctt

SEQ ID NO: 1197 - DNA, 408 bp, Homo sapiens
cgttgctgtcgggacatggcacctttcttctgtttcctggaaaccatttaccagaaagtgacgggcaaggagctgagatacgagggcctgatgggcaaacccagcatcctcacttaccagtatgccgaggacctgatcaggcgacaggcggagaggcggggctgggccgcccccatccggaagctctatgctgtgggtgataaccctatgtctgacgtatacggcgccaacctgttccaccagtacctgcagaaggcaacgcatgatggggcgccagaactaggggccgggggcacacgggagcaacagcccttagcaagccagagctgcatcttcattctggtgtgtacaggcgtctaaccatcccaggaaccccaacagtccacggagcctggtccttggaagagg

SEQ ID NO: 1198 - DNA, 393 bp, Homo sapiens
ggcacgagggaacatgggctttgcagcaaaagcgatgaaatctgttcatgaaaacatggatctgaacaaaatagatgatttgatgcaagagatcacagagcaacaggatatcgcccaagaaatctcagaagcattttctcaacgggttggctttggtgatgactttgatgaggatgagttgatggcagaacttgaagaattggaacaagaggaattaaataagaagatgacaaatatccgccttccaaatgtgccttcctcttctctcccagcacagccaaatagaaaaccaggcatgtcgtccactgcacgtcgatcccgagcagcatcttcccagagggcagaagaagaggatgatgatatcaaacaattggcagcttgggctacctaaac

SEQ ID NO: 1199 - DNA, 400 bp, Homo sapiens
ggcacgaggccaaggttcacgtacggccacgcgggcaccatctacaaagacttcgtgtacatctcggggggccacgactaccaaattggcccctaccgcaagaacctgctatgctacgaccaccggacagacgtgtgggaggagcggcggcccatgaccacggcgcgcggctggcacagcatgtgcagcctgggtgacagcatctactccatcgggggcagcgatgacaacatcgagtccatggagcgcttcgacgtgctgggcgtggaggcctacagcccgcagtgcaaccagtggacccgcgtggcgccgctgctgcacgccaacagcgagtcgggcgtggcagtgtgggagggccgcatctacatcctgggcggctacagctgggagaacactgccg

SEQ ID NO: 1200 - DNA, 408 bp, Homo sapiens
ggcacgaggcctctcggcgcttggatattaatacggtcaccgtggagtttttcctggtgggacaagacaacgggccggtggaggtgtccacattgcagtgcttagcgaatgccacagacggcgtgcggctagcaacccgcatcgtggacacaccctgcaatgagatgaacaccgacacctttctcgaggagattaacaaagttggaaaggagctggggatcatcccaaccatcatccgggatgaggaactgaagacgagaggatttggaggaatctatggggttggcaaagccgccctgcatcccccagtcctggccgtcctcagccacaccccagatggagccacgcagaccatcgcctgggggggcaaaggcatcgtctatgaacctggaggcctcaacatcaaag

SEQ ID NO: 1201 - DNA, 381 bp, Homo sapiens
ggagcggagcccggagcgtcgtggaaagcattggacacatttccaccatgctaatggcattttaaatatatttggcaattttcccaattttttactgaagaaaactgtaagtttatacttgaggactgaagtgtgactctgccgattatcacgctttcaagatgaatctggaaaaactcagcaagcctgaactcctgacactatttagtattcttgaaggagagcttgaagcaagggaccttgttatagaagccttaaaggcccaacacagagatactttcattgaagaacgctatggaaaatataacatcagtgatcctttaatggctttacagagagattttgaaacactgaaagagataaatgatggcgaaaaggcgg

SEQ ID NO: 1202 - DNA, 402 bp, Homo sapiens
ggcacgaggggatgtctctggcgtggtgatggaatgtgggcttgatgtgaaatacttcaagcctggagatgaggtctgggctgcagttcctccttggaaacaaggcactctttcagagtttgttgtagtcagtgggaatgagggctctcacaaacccaaatcactcactcatactcaagctgcctctttgccatatgtggctctcacagcctggtctgctataaacaaagttggtggcctgaatgacaagaattgcacaggaaaacgtgttctaatcttaagcgcttcaggcggagttggtacttttgctatacaggtaatgaaagcatgggatgctcatgtgacagcagtttgctcccaagatgccagtgaacttgtaaggaagcttggtgcagacgatgt

SEQ ID NO: 1203 - DNA, 396 bp, Homo sapiens
atcccatcgattcgaattccgttgctgtcggcccggtggtgctgaagtggaagcactgtccccgatggggctgcctggggaggaggattcaggtcctgatgagccgccctcacccccgtcaggcctcctcccagccacggtgcagccattccatctgagaggcatgagctccaccttctcccagcgcagccgtgacatctttgactgcctggagggggcggccagacgggctccatcctctgtggcccacaccagcatgagtgacaacggaggcttcaagcggcccctagcgccctcaggccggtctccagtggaaggcctgggcagggcccatcggagccctgcctcaccaagggtgcctccggtccccgactacgtggcacaccccgagcgctg

SEQ ID NO: 1204 - DNA, 409 bp, Homo sapiens
cgttgctgtcgagcaaagcagattatgagctatacaacaaagcctctaatcctgataaggttgctagtacagcgtttgctgaaaatagaaattctgagactagtgatactactgggacccatgaatctgatagaaacaaggaatccagtgaccaaacaggcattaatattagtggatttgagaacaaaatttcatacgtagtgcaaagcttaaaggagtatgaggggaagtggttgctttttgatgattctgaagtcaaagttactgaagagaaggactttctgaattctctttccccttctacatctcctacttctactccttacttgctattttataagaaattatagagtgagtgtattttccttgtgtatatattaaacacacccatacaaacattggtaaagtc

SEQ ID NO: 1205 - DNA, 399 bp, Homo sapiens
ggcacgagggatgtaatgcctggaaagtatacaatgaaaatctagttcatatgattgaacacgcacagaaggaacttcagaagttaagaaaacatattcaagatttaaactggcagagaaagaacatgcaactcacagctggatctaaattgagagaaatggagtcaaattgggtatccctggtcagtaagaattatgagattgaacggactattgttcagctagaaaatgaaatctatcaaattaagcagcaacatggagaggcaaacaaagaaaacatccggcaagacttctgaaaagacaatttagcaggtagaagaaaagttgggctttcacaaaaggcatctgaacttttaatgaactttgaaggacaacagcatcttcccaaaaccattggtg

SEQ ID NO: 1206 - DNA, 403 bp, Homo sapiens
tcgaattccgttgctgtcggcctgggaaactaaaattatttccagagagaaacgacagctgcgtaaacgtgataaggtgctgactgattctggttcattggattcaactatccctgggatagaaaataccatcacagttaccaccgagcaacttacaaccgcatcatttcctgttggttccaagaagaataaaggtgattctcatctaaatgttcaagttagcaactttaaatctggaaaaggagattctacacttcaggtttcttcaggattgaatgaaaacctcactgtcaatggaggaggctggaatgaaaagtctgtaaaactctcctcacagatcagtgcaggtgaggagaagtggaactccgtttcacctgcttctgcaggaaagaggaaaactgag

SEQ ID NO: 1207 - DNA, 399 bp, Homo sapiens
ggcacgaggcggggagacctgggatagcaagttcagcaccatcgcctccagctacgaagagtgccgggctgagagcgtgggtctctacctctgtctccacccgcaagtgctggagatctttggctttgagggggctgatgcggaggacgtgatctacgtgaactggctcaacatggttcgggccgggctgctcgctctggagttctacacacctgaggccttcaactggcgacaggcccatatgcaggcccggtttgtgatcctgagagtcttgctggaggctggcgagggactcgttaccatcactcccaccacaggctccgatgggcgcccagatgcccgggtccgcctcgaccgcagcaagatccggtctgtgggcaagcctgctctagagcgctt

SEQ ID NO: 1208 - DNA, 349 bp, Homo sapiens
tataaatattattgtatctgctttcattttattaaaattatcatttattttgtttataatcagcaatgcattatatttttgaactatgcaatatttactttatttttttagcaactccttttcaagaaactttttttaacaatcaaaatacacaatattttaaatagcaactgttattccaatattctatataaaatatgtcacgtacacaaaaagtcaggtttgtcagatattatgaaatctgtatataaaatatacacatatacatatatgtatacatatacaagcataagtacttatttattatagcaatctatgctttttgaaagacagtatggaaacaagtgaa

SEQ ID NO: 1209 - DNA, 350 bp, Homo sapiens
  misc_feature (1)...(350): n = A,T,C or G
gtcatctctgactagttgtgtaaacttaagctacttaacctctctcagctcagtttctcattgtaaataagtaaggataatattttttaccccacacaactattaagagagttagatggggaaaaatgcatggataatatgggctaccttggttgaagctgaggctcagctatacctacatgtgaattttgtcactatgtacattggttttgagcagtgtgactttttcactcagacaaatgtcttagagctctatgtatgttagaacaaagagagtggcctcctgccttttanagagccttacaatatttcatagtaggtattatgcaaacagaatacaaaaaagagct

SEQ ID NO: 1210 - DNA, 336 bp, Homo sapiens
tcaagagctcgaaaacaatctcaatcatttacagggttgtgatcatttcacttgcattaagccaactaaagttgtatttgtaaaagtaatgctatgaatattactatttgacctagacacataggttagaattggaaacacaggctataaagtatagtaattgtgtaattgtgaaaatattaaggcttcaactcaaaactgaaacacagtagggcttagaaatctttgaattatttatacccctcagtttaaaaacttccagtccaggcgcagtggctcatgcctgtaatcccagaactttgggaggccaaggcaggcggatcacctgaggtcagg

SEQ ID NO: 1211 - DNA, 339 bp, Homo sapiens
ccaaggtacggctgctagaacacgaccgaagggccatagctaaattatctaactatgttataaacattgggaataactatgttataaacactgggaattacagagaactagtctggaatggggctgactctaaaaatgcttataatcgcttggagaaacttggtcgtgaataccaagacaataaaagtcaaacaaaatccttaatttagtttactgcagttgttcatgtggcactgggccctatggaagcccaaaaaaagtattcgtattataagtaaagctgtgccaaaacatgttaaagacttatatttctttatacttatagaaatatttagagag

SEQ ID NO: 1212 - DNA, 310 bp, Homo sapiens
cgggtgataactttttggttacctgaagcatttatgaatacaggtaagtctgtggctatgttatagaatattgaggtctccattggtttgacttccaaattagcgctttattaaactcggtgtcagtgtttgtacacctacttgggctgtatcttttctactgtgaaacatattttaactgtgaaatgaatattttaaagaatcaccttggggccaggcatggtggctcatgcctgtatctccaggactttgagaggccaaggtgggtggatcacttgaggtcaggagttcgacacagcctggccaacat

SEQ ID NO: 1213 - DNA, 359 bp, Homo sapiens
aggtgggtttgtctagttttatctgtttttgggggaagagttattttaatacaagctacactggaactgacttttgaattgaaacctctttccatgcttggttcaaaccaatccctatacgtaatggttatgagcccagagatggagccagggtcctgaattcccacctctgacacttctggctcttaatctctgactatttgcttaacatctctgtgcctccatttctatataagtgtttttaccggtattatttatttaataaatggagaaacaaagacccaacatgacacctggcaatttggtggcagaacctaaatctcaggtgtcctaacttccagtccaaagcatagagaaaa

SEQ ID NO: 1214 - DNA, 355 bp, Homo sapiens
ctttactttgcagtagttgctcaaaattacgagtaaaagaaaggaaaatagatagcttcaggaatgatggaggggagaggaatggcctaaaagcaggatgcatagtggtgaaaagtaaactattttacagcttcatctggagttggaccaatatagcataaaacatttgaagttagtatgattgtctgtagccatgtggctggatgaatccacaatgatcgttaaaggggccactgacaaataccatacaaaaaactgtgacttatctacctagtcatttacatcattatacttctcacagtgaagaatgagaaagtattttaaaagtagacatagctttaaaagatgtgctctg

SEQ ID NO: 1215 - DNA, 340 bp, Homo sapiens
tacattgttcaggtcttctgtgttcttacccaggccccactcaacctttgagctattccagtatgagagtgaattagacctcccactatcacggtcttactgtcatttctcatggcattagtcttaatattttttatatggtaattctatgttcaagactgtgaacatattcaggttccaagttattttgtgttcattaaaaattttactttgaatcattatgaatagttcctaggttgagcttcgggctccctgaccccagagcagtttccatttgcacgtgttgaccatattctctaacccgtcccataaaattgattctactatttcctgcttttgg

SEQ ID NO: 1216 - DNA, 358 bp, Homo sapiens
agaaattgaactgaaccgtaaaggatagctgagaacagaaaatgcttgagaagaatattcccataaagaagtgataggaattaaaacagcaaatacagtttgataccaggtaatagagtggcttgaatccagtttagggaatttggtttgggtgtgtatatgtgtgtgtgtgtgtgtatgtgtgagagtgtgcgtgtgcgtgagagagagagattgcacatatatattgacgtgtgactaaatagcggctgcaacctgaacagtctatactcttggaaacccacggggtgacattgtcttgtgcctggtattggaagcacttattggcaggcagatgatggagacttagtatcgaggg

SEQ ID NO: 1217 - DNA, 340 bp, Homo sapiens
tatctacgggatcataagtctaggtgtctataattcagaaaactacctttcattgtgtatttgatgtttttgtatatccagagcgtattaataaattgaattttaaaagtctcttaaattaaaggagctaggttgggcgcagtggctcacccttgcaattctagcacttatggaggccgaggctggtggaatcttcagaggtcaggagttcaagaccagcctgaccaacatggtgaaaccccgtctctactataaatacaaaattagcagggcatggtggcatatgccttgaatcccagctactcgggagggtgaagcaggagaatcaccttgaacccct

SEQ ID NO: 1218 - DNA, 353 bp, Homo sapiens
  misc_feature (1)...(353): n = A,T,C or G
aggcagaaatttcccataatggtttacaagcttggtggaatatcaaaccccatcagctcttggaatggaaaagaagttctcacacaaatctaagacctaccaataataaagataaaaacaaacaaccaacaaaaaaaattttcaaacaaaaagaaaaaaagggacccccccccttttttttggaaaaaccctggtttttaaggccccccattttttctcctaccaaaaaaaaaatttggtacaattttttcaaaaaaaaaaaaaaatgttgggaaattttttaaacggcccccaatttaggcgccaataaatgggcgaaaaaaaaaaaaaattttccctggttttaaaaaccn

SEQ ID NO: 1219 - DNA, 385 bp, Homo sapiens
cgttgctgtcgataaagtattgtaaatagaatagtgttgaagatatgaaatatggctatttttaatggtgacaattatgacttttagtcactattaaattggggttacctatatcagtacaatttgtagttgtttccaggtttggctaataatcattccttaacctagaattcagatgatcctggaattaaggcaggtcagaggactgtaatgatagaattaaattagtgtcactaaaaactgtcccaaagtgctgcttcctaataggaattcattaacctaaaacaagatgttactattatatcaatagactatgaatgctatttctagaaaaagtctagtgccaaatttgtcttattaaataaaaacaatgtaggagcagctt

SEQ ID NO: 1220 - DNA, 351 bp, Homo sapiens
  misc_feature (1)...(351): n = A,T,C or G
gaactgtgatggcctaggggatgagataatgcagcaaaataaaactgttcttcctaccatttttgtgcagttattttttgatttttttgctccattgtgttgtgacagtatcttacctacacttctgagctctcctagagctatttttattcttggatagctaattgtgtgtgtgtgtgtgtgtgtgagtgnntnnnnnnnntnnnnttcnnntttntnnnttttttnttccctntntcttnttttttttgggggtttggttttttttgtgctggnccttttgttctattggggtggtgggggtgtttccttgctgcccttgttgggggcccctcatttgtttttttttac

SEQ ID NO: 1221 - DNA, 341 bp, Homo sapiens
caaattattgatgccaggctgaaacttctctttctttaaataaagcactcttgaatgtctcctttatgttttgctttgtgatcatacttcagttaatttttcaagaagaaaaaaaagaagatgaagataaggatgatactgaacattactaaatgattataatctccccgccattatgctaatcactttgagctataatctgttaatatcagggaatattttattttttagagaatcagtattttctcagtttcatagagatgcatatgaattgagtgtatcactagggaagcggaaccactgagcaatacaaatgaggaatttattttaggccgggcgcg

SEQ ID NO: 1222 - DNA, 345 bp, Homo sapiens
  misc_feature (1)...(345): n = A,T,C or G
accacatggctgcctatgatacagagcctgcttttgataatactactgtactaatcataccactttagacttcagaatgacacatgtgtccatagataatagctaggttgggctgaggtgggattatcaaaggtccaatgtgaaacagcacggcacatagtattgcccgttttaaacaaaacaaaggctgagtgtatgagcaatatatcatttaagacacttctcaagctgcagtgttatggaaaatggcagagtgaaaccagcaatccaaagtaaaatataaacaacaaataccttccaaagactctttaatatacacataaaatttagacctactttgagccn

SEQ ID NO: 1223 - DNA, 355 bp, Homo sapiens
atgctattcaggagaatcaaagtaaaccggtgcaaagaagcgtttgacaattatgagcacactttgttccttgggaaaacatacttggttagttagaaaaaacaaattaaaagaagaatgagctacatgttgtactaatacatttcattcttcttaacactaatgcataccttgaggtccttagctgtagcccctaccttccaggttttcatagagtggagttgaatatcaacaaaattaaataccaacatttacataatacaagctatttaaacaatatcattgcatttatttggggcttcaggtaagattaaattaattgtttaaaccatgcactttttgaaaaataattact

SEQ ID NO: 1224 - DNA, 383 bp, Homo sapiens
  misc_feature (1)...(383): n = A,T,C or G
cgttgctgtcggtcaggatggtggattaacctgtacccagaatacttattgttcattttgaaaagactttgttcttttcatttttatttgggagtctttgtgaccagagaagttagggaggaggttatttttgtgttttggggttggctggttggttggctttgnnnncggccctacatgaccgatgaacaaatggttccagatggctctgtgtccataggcagccttgaatagggctttacacactctgagacaatgacagcctgtgttgactgaaccctgacttgtgttcaaccctgccatagtgccagtgcctttgcatgaattcgataatttgagcctagcactcgccttaagagggtggctctggtacctccccgttg

SEQ ID NO: 1225 - DNA, 360 bp, Homo sapiens
  misc_feature (1)...(360): n = A,T,C or G
aactaatttgtacagatttaaactacaaactcccttccaccgcttgtacagtagctggtatctttactcaagtctcacagtttcagctgctgatttattttattttatttagcctggttccttggcatttgccataggcttgcataaaatagggtcggccaaggatttgaagagagtatatacaatgatccctcaatatccatgtggtttgattccaggacccctgaggatataaaaatccacatacgggcagtgtgtgatggctcacacctgtaatcccagcactttgggaggtcgaggtgggtggatcacctgaggtcgggagttcggngccagcctgagcaacatggagaaaccccg

SEQ ID NO: 1226 - DNA, 353 bp, Homo sapiens
atatgttcattgcaacactattcacaatagcaaagccatggaatcaacccaaatgcccatcagtgacagactggataaagaaaatgtggtacatatacaccatggaatactataaagtccattttaactagacatccctgctgaaatccgttcctcctgccactgtctacctattgcagatctgcaaatctccaggtctatgaaactcaatctttcaaacagtaacctggtctaagctttattctcctattacataaagccacaaaggttatgtccattttgcataagaagaagctgaggcctgaaaggctgacttgcctatagtgtgtcccaagttagcggtggaagctcgg

SEQ ID NO: 1227 - DNA, 309 bp, Homo sapiens
ctaccattttaaattaatttagcattggtctgttacaaagtgcatataatttagattcagaagaattgggcttcagttatacttttgtcactttctcaatatgtaacctaggataaatcgctccctctttttcaaatttgatgtgtacaaatgtaatatgaagtacttggcaacgtcaggaacatttgataaggcaaggtatataaagatatgtgtgtagccaggcacggtggctcatgtctgcaatcccagcccttggggaggccgaggcgggtggatcacctgaggtcaggagttcaagacctggcg

SEQ ID NO: 1228 - DNA, 344 bp, Homo sapiens
aaacaagaagaaataactgttatcagaatctggagagaaagttgtatggggagggctacctgacaggagctgtgacttttagtagaggggatgcagttagccatggattaccctgaggtgaatgaaccaggctaataaatataccagcaacctccctccaccatcaactagggtgattctataatttattgtccaaagtgggacaaccactatgggcaatttagtcatatctattaaagttgaaattgtgcatacatagaattacacttacttattctggagacactctctcatacaggttgcaaggagacatgcaaaagaatgttcaacagctacaagaactg

SEQ ID NO: 1229 - DNA, 339 bp, Homo sapiens
  misc_feature (1)...(339): n = A,T,C or G
cttcctctttcatatgcaaccaattccagaataaagagaattctgaggtcttagagaatagaagagccacctaaatgcctgcaccgatatgcatcagactgttaggtaagcgcacacacacacacacacacacacactcacacacacacaaagacgaagaagattatgttaaacttctaaaactctgcagttttatttaactaagtaaccattaaactaattaaccagctgcctaatacagacattggaatatggagtgagaggctgcttgaatataactaaaatatgtgggtgcttagcgattatcancacgctagaattctagggattcatattatg

SEQ ID NO: 1230 - DNA, 340 bp, Homo sapiens
catttccactctttttggcctttaatcactcatgatagccctttaatgtgtcccttagactctatgatatttgatagtaaaagaggtattgaaagcatattttctggtcctcctgctttcagattcttccttctgtccctacttctgagatggagactgagtagggagtcaccaaactgatctggagaagatgaactagatatgctcagattatggaccctggcctcagtggggagaaactggaattctaacccaccagtccaactgtcatatccaattttaaactctggctgcgaaccatggctcacacctgtaatcccagcattttggaaggccaggg

SEQ ID NO: 1231 - DNA, 340 bp, Homo sapiens
  misc_feature (1)...(340): n = A,T,C or G
agggagaagtctagctcctgaccaggctctgatttccccggccctgccctattcaagttcctcaaattccttgaccccaacccttgccccataagaaacctccccatgaccctgaccctgacagagaactggctgtgaaaatttttgcattgacaacagatattggaatgcagggattccctatctacttcaggcaccttcaagaatcagaggaggccaagcatgatggctcatgcctgtagtcccagcactttgggaggccagggtggggagatcacttgaggccaggatttgagaccagcctggccaatatggcaaaaccccgtctctactaaaaatn

SEQ ID NO: 1232 - DNA, 336 bp, Homo sapiens
aactagatggagtcctggcgctcactgtgattgagaacacatgacaaactaataggtttactgggcaggcggctaagctgatctacttgctggttcaattagctccactttccggaggctagcattttcccaaccttgccccatgctcttgtgggtacatttaccctatttggggccttagcgctttacaaatgaacgtttcagtttaagagacattgccacataacttatattaagtggtatgaattcaaaagcaagctctgccactacacatcagaatccagcactgaaggaagtgtggaagtcagaaagatggacaggaagatcccttcaagc

SEQ ID NO: 1233 - DNA, 383 bp, Homo sapiens
cttagtggcttttatcccctcggcatgctattttgctgatgtttctataattgcctcagactttcacatttactagtagggctgagagaggctttagtgaggaaagaatattcagaataaaacggttgagaaagctgagaagaccattgagttttgatcagttgtgaatagagtgcaaagccatggccaagctgtttttggaaacgctggccggcgtgtcttcagtggaaaaagcaaatcaaaatggagcgagagcaaaggggcgtcctcagtcctcaacctacaatcactgtatggaatcggtcctggcagctgaacataggaggtcactggaacaagtgatagtgcagattggctttcaaacatcctcctggcttgagttt

SEQ ID NO: 1234 - DNA, 353 bp, Homo sapiens
gtattgactgaactaccagatattgaggcttctttgcttattagctgcatgactttgggcaagtcaagttccacctgagccttgcaagtcaggcctggggagtccaaccacccagaacctttgagtctctgttagagagcaagaccctctcttaagaaacaaaaataaaacaaaaaaagagtattgggatatggggagtttggctcctgtagaaagggtagtctgggaggcctgttacaggagttaacattggacctgagacctgaggatgaacagaagccatcctgaaagaactgggaaaataaagaggtggccaggcgtggtggcgcacgcctgtaatcccatcactttgg

SEQ ID NO: 1235 - DNA, 243 bp, Homo sapiens
  misc_feature (1)...(243): n = A,T,C or G
catagtcaagataggctaaattatgctgagataacaaacaaataaaaactccaaaatcttaatgcctttaataacaaagatgtatttcctaatagtgctacatgtccctctcagatcagcaaagagatctctgctcattgtatttaataagaggcccaggctgacaaagctgctgccatcttgaatatagctccttgatgtgccagacagaataaagaactctgcaggatcacccattagcan

SEQ ID NO: 1236 - DNA, 342 bp, Homo sapiens
atgctaactgagttaattagatgagattctgtagagaaaatggacactataagaaataatagtgtccagaactgagttataatgacctctaatatttaatgataaatgaaagaagaggaactgatgactgaatctgagaagaaaccaataaacttgtaataacagaagaacaaacccaggtggtgctaaagaaatcacagttcatcaaaaaggagggacaagtggacttgccttgttaaagatggactgccttaccaaatatgacaaatattaaaatatgtttagatttcaatgatgaccaaatatgtaaataagacactggaatttattcgtcaaattcct

SEQ ID NO: 1237 - DNA, 355 bp, Homo sapiens
tttcaatctttcgtcccaaatgccatattcactacaaggaacaggggttccttggagaaatggctgaatataagtgtgggtaaggaaatatacaaatgaacctggaatatcttattatatatatattaaaaaaaatctactagattcacgtcaaaagtagccagagaccaacttgaagtttgttatttgagcaccaatggggatatgaactggaacccacaggttcatattgacaggagttaaaaaaaatactttggtcagctttgaatgatgttccattagcaagattaaccaagaaaagggagaaaaaatctaaataacctcactaagaaatgaaatgagagctattacaact

SEQ ID NO: 1238 - DNA, 360 bp, Homo sapiens
cagggaaatttgataagttaatcattatttcagccaacaaatctgaggcggttaaaatacttttccttccatatttgatttataagcatcttccccttgatgtgatttatcttttctaaagggactagatcattctaagcagaggaacaatcatagcgaactgtgcctcaggctatttgcagacgatgtcacttgagtttaaaccacaaagacatttcagaaagaaaacatttctatctcttaatatgtaagccaagagatatgaaatcatggcatccccagagaaacacctttccctgatgtcaacttggcgacttgcatctgcttttctgatgaacaaagaaaagtatttggctatgg

SEQ ID NO: 1239 - DNA, 380 bp, Homo sapiens
cgttgctgtcgattaatttaacaaatttatttagtgttgtctcagacacttgagacactggagagttggaggtggatgaaaggagaaccttattctttagttgtttacacagcagagtaaatatcacaaaggcaggtaccttgtcccttttgtcaactactgtgtctgcagcatctagcaccatgtctgccatacagtaggtgtttgtttaattttttaaatgaatgtaaagtacaggtaagtatagttttacatatattatcttccaattatttggattcctcatttcatttctctcctcatagtgtgggaagaggaaagatttgagatgaaatggagaaacatcaagatgaaatgcagagtatttagacaagattatc

SEQ ID NO: 1240 - DNA, 337 bp, Homo sapiens
  misc_feature (1)...(337): n = A,T,C or G
ggtttcaccatgttgaccaggctggtctcaaactcctgaccttaagtgatccacccgcctcggcctcccaaagtgccgggattacagacgtgagccaccgtgcctggccaacatttatttagttgaattcttaaaatttatttttctaatagaataagggagagcattagaagtagttttcataagacacaataaatataaacctgtcatttacctgtctagccctgatattctgaaatctggaacttgggtttagaacaaaatggattcagttaatccttttttttttttaaagagagagatttgtatgaggctggctgggttattcattcattcn

SEQ ID NO: 1241 - DNA, 367 bp, Homo sapiens
  misc_feature (1)...(367): n = A,T,C or G
tctacggctgctataatacgacagaagggaattcaaggagccggtcaccacaagctgcataaacaaatcgttaccagcataaacagaatatatagcagaatttattcttcgaaaaaaatacttactgatattcaggccaggcacagtggctcctgactgtaatcccagcaatttgggaggccgaggcgggtggatcacctgaggtcaggagttcaagaccagcctggctaacatggcaaaatcctgtctctactaaaaatacaaaaattaaccgagtgtggtggtgggtgcctgtaatcccagctacttgggaggctgaggcaggagaatcgcttgaactcggggggcggcggttgcagtgagccan

SEQ ID NO: 1242 - DNA, 359 bp, Homo sapiens
tgggtttgtcagtttcaataggagattctatgtatttagtctccaaagaacccagaattatctgtggggagttttgaaggagtgagccatttgtaaaaaacataatatgtagggcatggcaaacaggaagaaaaagcaaaaaggagcattagagtgacaaaaggacaaacccaaaacaggatttacatggaaacccatgccagcaacctgcatcagagaaatgtatctgcagccagcagtatctctgctgccatacagaggtctagaaattttgaaagtttataaggcaaaaagagaaaagacaaataccaagcaaggaatcacagatggaacaatcagaaggattactaaaacaagaa

SEQ ID NO: 1243 - DNA, 287 bp, Homo sapiens
ggaccctgcccctcaccctacacaggctataggatctggaagggaagggacggttcctgttaatatctttgcatcttaaggacacagcccacagggtctgttgggtgactgactgattgaatgagcaagacttctagttatacatagactgaaaacttccacttatctctgcttcttttcaaaatcccactaaaatatgaataaatgcatgttttaaagacaaaaggaggccgggcgcagtggctaacacctgtaatcccagcgctttgtgaggccgaggcgggcgg

SEQ ID NO: 1244 - DNA, 245 bp, Homo sapiens
  misc_feature (1)...(245): n = A,T,C or G
ggcagccttttcatagatatactttaaataccctttgaataaattcattcagcaatagagttattgagtattgtgcagaggtatagggtgatataattgtgactaggtgactactttacattagatagtcttctctgatgttaacatttaaatttaggacctcggctgggtgcggtggctcacgcctgtaatctcagcactttgggaggccgaggagggtggatcacctgaggtcgagagttcan

SEQ ID NO: 1245 - DNA, 386 bp, Homo sapiens
cgttgctgtcggccaaatactgtgcttagggctctgtccagatcattccagttaatccgcccaagaccccaacagcacaggtgttgctatatttttgtggtgaggaactgagacccagggaagtcacggtactttgcccaaagtcaccccgatgtcaagcgttagagcaagaatttgaaccccagagcttaactcttaaccattttgctaactggctgtctctccaggcccccatcaccctttccatcaccctcccctgccccaggggcattctatcagatggcaggtcccccctcgcttggctcagcatctccaatttaaagcttcatggatctccctcctgttgaaggcatgggaaggatttcccatctcagaaactggacaag

SEQ ID NO: 1246 - DNA, 338 bp, Homo sapiens
cttgtctctttttctccttttgtgaaccagagattgaatactaggatagtcaaaagcaactacatatacaagaaaaatttgaaagtcattgtgcatgcccagggaaaggcacaggctcagaaaagacctgagaagaccttaagtttacagttcagcctaatcttcagaaaagaggcagcctacaacaactacaaacaaataaacaacagcaacaacaacaaagcaaacagcaagcactgaggaatgggaggaaatctgatttccagagatacaacactattaggttcagaagctcaatttaaaaccaaatatcacaaggagcacaaaggaacagaaaa

SEQ ID NO: 1247 - DNA, 376 bp, Homo sapiens
cgttgctgtcgggaaaaatgtggggtgtaccaggggaagactcggagtgcgatggcggcgcaaattccaattgtggccaccacttccactcccggaatagtccggaacagcaagaagaggccggccagcccttcccacaatggcagcagcggcgggggctatggcgccagtaagaagaaaaaagcgtccgcttccagctttgcgcagggtatcagcatggaagccatgagtgagaataaaatggtgccctctgagtttagcacaggacctgtggaaaaagctgccaaacctttgccatttaaggatcccaactttgtgcactctggccacggtggcgcagtagctggcaagaagaacagaacctggaagaacctgg

SEQ ID NO: 1248 - DNA, 339 bp, Homo sapiens
caaatacttactgaccactgcatggcaggctctatgctgagcactgtgaatacagaagtgcatcttgatatggggattcgaactgcatggagctcacaccgtccaacccagattgacgtacataataggtccttgactaaaaaaatctcagaggctgccaggcctagtggctcacacctataatcccagcactttgggaggccgaggcaggcagatcacctgaggtcgggagttctagaccagtctgaccaccatggagaaacctcatctctactagaaatacaaaattaactgcgtgtggtggcgcatgcctgtagcccagctactcgggaggctgtg

SEQ ID NO: 1249 - DNA, 337 bp, Homo sapiens
cccgcaggtggaggagacaaggtctttactgttcacccaggggctaggcctcttccactggctccctgaatccccatgctggccaccaagggaaggagctatttctgcagctggacaaatgaggaaacagaggcacaaagcattctagcatttgctcaagtggcacagcagtaggaactctttccctgggggccggcccaggagtattttgtcccatggagaactggaacagcatcaggacagtgagccagcaggcagcactggcaggtgtacatttagaagactgactgttgcccggcgtggttgctcacgcctgtaatcccagcactttgggagg

SEQ ID NO: 1250 - DNA, 355 bp, Homo sapiens
atcagatagggtcgagaacaactgatccagacatatataccgaagtgttcatgaaataaagcgtagaagttagtgcacgaatttgttctgggcgtttgttttagtattccagcattttgtttctattgctaactgatgagaaatgctttaaacacataaacatgttctgatgtgtatgtgtgagacttgcgtttcccaacgttgcataaaataagcacaaataagtgtaaaatagtgtaaaataactgcaaatagctttatcttacacagaaagacaggtgaacagctcgtctttaatcttaagcataacatttgttttggtaatcttataaagattgcttcttgcacattttta

SEQ ID NO: 1251 - DNA, 268 bp, Homo sapiens
aaaacaaaaaaaaaaaaaaaaaaaagggggggggtttttttctggaacccccaccgataaaaaactttttggggggtgggacaaccccccctttaaagggggggaaaaaaggggctttttttgaaaaatggggacgttttttgtttttttggcaccctttaaagcccccataaactgggtaaaccccccgcctgggcttttttttttttttcacgttccaggggagggggggggagttttgctccctccagcagccccttttttcctg

SEQ ID NO: 1252 - DNA, 291 bp, Homo sapiens
aaaaaaagcttaatagtcataatatatatgggatttttaccaaagaaaaacaccaaaatagaaacatgtataaaggaaattaaaaggaaatcaccaaagacaaaataagaaacccctcacaaaacagcacattaaaatgagacatttttgggttgggcgtggtggctcacgcctgaaatcccagcactttggcaggccgaagtggctagatcccttgaggccaggtgtttggcacgagcctggccaatatggcgaaacccctctttactagaactaccgatattacccagg

SEQ ID NO: 1253 - DNA, 342 bp, Homo sapiens
tgcatctcttgttatcttctgtgaagtgagtcagtttcaactttgcctttgtgcttatgtgtcattctctgctctttgatgttcaagtctatattggttccagactctgttttatttaatctgtttgttttctttctaaaaacatattctatattcccgttcaagagtggagctaacttcacaggatttgggaaaattctgattattctagcccatacacagaatgcccaggacaaggaagacaccacttctctgaggaattgtgccaagaatacaagtcggtgaagtcagcatgcacatgttgaatgtttacaatgtgccaggtactttcatatactattc

SEQ ID NO: 1254 - DNA, 386 bp, Homo sapiens
  misc_feature (1)...(386): n = A,T,C or G
cgttgctgtcggggggatgcacaggacactctgtgcctcagttttcttatctgtaaaatggggcaaatacctaccaagtcatagggttgatgtaaagtctagttgagataatggagggtaatttcttttttttcttaagcttaaattttggatccattttgtgttgatttttgtatattgggtggtaatttcttagaagctagaaagttattaaatgctgcttatgagccaaatactgtgccaagggctctgtccagatcattccagttaatccacccaagaccccaacagcacaggtgttgctatatttttgtggtgaggaactgagacccagggaagtcacggtactttgcccaaagtcaccccgatgtcaagcgttagagcan

SEQ ID NO: 1255 - DNA, 382 bp, Homo sapiens
tacggttgcgagaatacgacagaaggggcgtgagctactttttttttaaacagataatcaacagggccaaagcaattaagtcattttcccagtcacttggccaataagcagcaagtcaatgaccagaacaaattatacaactttcatcttcccataactgatctaagcctaccaaaaaaacggatgagactagacagaagaaacagtgtcaccttcatccccggtcatctagtcaagaactacgcaaaagccatatgtaacagaaatctaggaccacaggctacagtgccatggcacaaacatggctcaatgcagcctcaacagcttgggctcaagcaattctcccacctcagcctccagagtagctggggctacaggcata

SEQ ID NO: 1256 - DNA, 343 bp, Homo sapiens
  misc_feature (1)...(343): n = A,T,C or G
gataggcctgaagaacacagggcgctgcatttagaaaggaggcggggtcagaggaatagaaagggatagggctgaagaacagaggtcgctgcatttagaaaggaggcggggtcagaggaatagaaagggacagggctgaagaacacaggtcgctgcatttataaaggaggcggggtcagaggaatagatagggacagggctgaagaacagaggtcgctgcatttacaaaggaggcggggtcagaggaatagaaagggacagggctgaagaacacaggtcgctgcatttagaaaggaggcgctgtcagaggaatagaacgggatacggctgaagaacacaggtn

SEQ ID NO: 1257 - DNA, 338 bp, Homo sapiens
gtcggttgtgacagtgaaaaatatcttcagacattgccaaatgttccctgggaggcaatatcacccttccttttctgccaggtagttctatgaatttctcacagcagaatttctctttccatattcctatgggcattagagaggtagaacatcagcatttaccagacatatttgatactaagtccctatttgttaagtcagagaagtctgaggttataaaatcattcccttcctcctcaaagagaagtgaaatccttatattgtagagatcaccaagttttcatagtcagacatttccactttgtctgggtttttaaaaaacctatcagagaaaacta

SEQ ID NO: 1258 - DNA, 317 bp, Homo sapiens
gacctgggagaagctgacaatgaaaatgatcggctttttttttttttttggagtggggccctcttttttccccccggtctgtatttcccacattgcatattgaagtaaaatgctcctgtccctggtgcttactagtgtagtgatcataccccggcatcctgcttggggaacaaaacatcccaatacctgcctagggcaaatttggcaaaccctaaaaaatatgagcccaccgcatttacagattccttaccacgaaaaggaaactccgcattttgtgaccatttaaaaattggggctatagctaccccaacagcccg

SEQ ID NO: 1259 - DNA, 338 bp, Homo sapiens
catcatatactcatggcactaaaccacaggaaattctaaaatttctagcagtatttctggtaatctaaataatatatataaaagtgtgtgtgcgcgtgtgtgtaggtcctttgttaaacccttgtacatttatgattcggggcggaagaattctttgctttagaaactatcttggttctataatttttaaaaaaatcctgtcttttttctgtttaaaaggcaatacttattcatttttttaaaaaacagtgacagtaaaaagttaaaaaataagctaagtagggactaaggaaagagtaaaagtcaagggtatctatactgattaaagaatttttagg

SEQ ID NO: 1260 - DNA, 341 bp, Homo sapiens
gtgcggctatggagacccaggggcagcccaagtccttttgaaccaagcagggaggggttttcagggtctttccagtgacccaagggaggaagggctgcgctgagatgtgccactttcaggcagagagagagagaaagatctgggggtgaggggtactagacctctggatcgggtgtcatcggctcgctccttggcatagtttcagacccgattttctggctgactttcagaactacagtattgctcaaactctgctgtgctcagagcctcgtaggagaactggtgagaatgcagatgcccaggccctaaccctggagattctaattcacaaggctagggag

SEQ ID NO: 1261 - DNA, 349 bp, Homo sapiens
acgacagaaggggtgttggtttgttccacatttaggatcattttcccaggctagattttcagatgtgggattatgggttcagatatggtttacacatttttatagttcttaatacagatggccaaattgctttctgaaagagaatcttttcttaagtatttttctccaacttgtatcttaaacatcctgaacatgcttagcaccactgtcttgatatatctgcggaaagccacgtctgcactttttagtgttgtgggccctgggataggcaggcattctgtgcttgctctttgtagctggacgtaaaatttctttttcttgctgggcgcgtgggttttttcccgaaatg

SEQ ID NO: 1262 - DNA, 383 bp, Homo sapiens
tacggttggagttgacgacagaagggaacacattaaaagccagagttcagggatatcagagctagatataaaatgttacccttcaaatgcagagagccttgaggttatgtgtggaatacccacgaggaggaagtccttaatcagttatcttgcaaagactcagcagaacctgggcataaacccagacttgagcaaacactaagacaatggctcctgcaagaactgtctcctctcaatatttggagtatgtcagatacagcagtgcctttcagaatgtgcctaacatccctaaagaatttgaatatgccactctttttttctgatttaaaattttcttactgttgcagagtattaatttaaaaagatgtttaagactgttcatg

SEQ ID NO: 1263 - DNA, 353 bp, Homo sapiens
gaggtttcatttgtggcgagattctctcccaggccacaagacatttcctgctcggaaccttgtttactaattgtaagtactttacaagtaagaacttgttttaaaaacttagcattcaaaaaaaaagctttctttaaaagatattcgattttcttggtttttttcttagcatgttatattttgaggttcagctaaaagactaaggttttcttatctaattgctttaaatttatacatttagtcaaattcaacaatttcttgctaagcattttgccagatgccaggcttttcaaagtagtgtaagatcccagccttgaatcctcatcaattgctgctttctgctgcaacacata

SEQ ID NO: 1264 - DNA, 342 bp, Homo sapiens
gataggggagagacagaagggaggaaaagatttttcttaaggagagcaagaatcaatactatgaaagtcaatttccttattcaaattcaaagagaaattttgtaaccaaaaatgggagaactactgaaaagtcagaagtaaacagaagactggagtagacagtgaggagcaaagataaaaggagagagaagattcaagacagtccccccatttttattggtctttagctgtgcctattgtgagtgggtagatttgtttaaaggctcagggtctggccgggcgcggtggctcacgcctgtaatcccagcactttgggaggccgaggcaggtggatcacgaggt

SEQ ID NO: 1265 - DNA, 374 bp, Homo sapiens
  misc_feature (1)...(374): n = A,T,C or G
cgttgctgtcgcacgaagccttggaaagcatactttcaccccaggaaaccttaaaagagagagatgaaaatctcctcaagtctggttacattgaaagtgtccagcatattctgaaagatgtcagtggagtgcgagctcttgaaagtgctgttcaacatgaaaccttaaactatataggtctgctggactgtgtggctgagtatcagggcaagctctgtgtgattgattggaagacatcagagaaaccaaagccttttattcaaagtacatttgacaacccactgcaagttgtggcatacatgggtgccatgaaccatgataccaactacagctttcaggttcaatgtggcttaattgtggtggcctacaaagan

SEQ ID NO: 1266 - DNA, 335 bp, Homo sapiens
aagactccatctcaaaaaaaaaaggaaggaaaaggaaagaaaaaacccttggaaaagtaggggattttgaaaaaaatttccccattttcattaaagagatggacatataattttaaaaaattcaaataccctatgtaaaatgctatgtaaaacaccctttgcaaaaacccaaagtattcaaatttttgagggtcatggcaaaaaaaaaaaatattaagggcagttaacgacagggggcaggccacataagggggaaactacttcaaactcacaggggaactctcagcaatatcccacagtcaaaagactttaaaaacccatattcagcatttttg

SEQ ID NO: 1267 - DNA, 360 bp, Homo sapiens
ctttgttttagaacgtatttgctcttccctagaaacagactcagaaaaaaaagaactattttctctaaaatttaaaaaaatattttctcaaaagtgaaacttggatatgtaaggttttttgctaaagctttgctaacattagtaatagcaatgaataggaattaatgacattagaaatagtaataccaaataactgtgactagtgcaacttcaaaataaatttcattctcccacaaagctcacaaattgctctttgcttaaagatcttcttttgttgtgtttaacttttctagagcattgtatatcttgcctaaaataaatccaattacgttaacaacatttaataaacattttcctccg

SEQ ID NO: 1268 - DNA, 358 bp, Homo sapiens
  misc_feature (1)...(358): n = A,T,C or G
ggacatgaagaaagagcttcctgcaattcaaggactgtacaaagctgaaacgcagagattttcatattatttgggagactcagaaatgagcttttaaggatgttccttgacttgcgggtcaataagcgcacaatggtgaagaaaaggctgccttctaatgacacggtgttccggtttgagactccgggcagcccaaggaaggccaacgtggaggcctcacgcagctccacagacagccccagctcggtgttcctcagctcagaggctgagaatggtgtggaggagaganagaaagcctagcggtcgtcctcatctgcataccatagcccatttgtgtaggcggagtctccagaccaga

SEQ ID NO: 1269 - DNA, 344 bp, Homo sapiens
tatctcagagagtactgggattctgaaagtgaaagggttatacccagttaaagtatgggagtgctggaccaagctaacatgttcaagaagaaatatgggatatatttatggaaatagataatgaaaatgctgaattgaagagcaaagattggacaatggagaatgtttcagtttatcaatattggtgcactcttccatgtaggatgatttaactctgtgatatgtaccctggaagattgaagaaatattacgactatgtaggatcttgggcactagaagcttgctgaaagcggattccactttaagctttgtagaaatgctaagaggtggccggtcgcggtggc

SEQ ID NO: 1270 - DNA, 346 bp, Homo sapiens
atcttggggaaggttaaagacacctggagaatgaaatcttggattttactttcctgaaaggctgaggctaggcataattctctgcctttgttcccctcctttgtcttggttaaatgttcctggccatactgtacctgtggttttattgtcgtcctttttgggaacaagcaggatataaatcagtcagtgaaattttagaatgtagctctttggtctagcatctaagtagataaagaagaaatgggcacttaataagtgcctctggaggcttgtgatttgcatggggctcccaatgaaaggtaaagtctttgcttagaggttacacacaccgaatgcagggtggtcc

SEQ ID NO: 1271 - DNA, 350 bp, Homo sapiens
  misc_feature (1)...(350): n = A,T,C or G
gaagaaagagcttcctgcaattcaaggactgtacaaagctgaaacgcanagattttcatattatttgggagactcagaaatgagcttttaaggttgttccttgacttgcgggtcaataagcgcacaatggtgaagaaaaggctgccttctagtgacacggtgttccggtttgagactccgggcagcccaaggaaggccaacgtggaggcctcacgcagctccacagacagccccagctcggtggtcctcagctcagaggctgagaatggtgtggaggagaaaaagaaagcctgcaggtcgccaacagcccaatcccctaccccatctgtggaggcggactccccagaccn

SEQ ID NO: 1272 - DNA, 325 bp, Homo sapiens
  misc_feature (1)...(325): n = A,T,C or G
ctgagaacagagaggggatggagcatgacaattagtgttcattgacattgttgttggaggtccctaggtagggccagactgcaggcagccagagagatggcccaggcctagggagggttgaggacggggacaggtgcagggccagcatccccaccactgcctggcagctccccagtaatgcagatgctgggtggcttcctggagagggcacaatcctgggggaggtgttgggaggttanccncnnntcnttnnnnntaaggcccacnaagtttcaggccgcgtggccagaggaatgagctgagcatttgttgtgctgcatgtaga

SEQ ID NO: 1273 - DNA, 386 bp, Homo sapiens
cgttgctgtcgccagagcttaactcttaaccattttgctaactggctgtctctccaggcccccatcaccctttccatcaccctcccctgccccaggggcatcctatcaaatggcagttcccccctcgcttgcctcagcatctccaatttagagcttcatggatctcctcctgttgaagtcatgggatggatttcccatctcagaaactgcacaagaaacaaccttggagttttgaacaaaggatattcaaggagtattcaagaatgaatcttcataatcgtggtcatgagacatgagaaaaaaggtgtctaccacgtcttgtctctactcataaagaacattggccaggtgcggtggctcacgcctgtaatcccagcactttgaga

SEQ ID NO: 1274 - DNA, 351 bp, Homo sapiens
cggggctagagaagaacaaactagattcttgcaggcattccaaggaggctcatcttgaagcccaacctgaccgaatgcaccagtagactcggccaagcccttccttatggccccaggaaactcccaagctatggcaccacaggaagcctatccaagctgaggacccaagacaagttaaaaacaggttcaacggaaaaggctgagaatcactggcccattctgtacccatgcctttaaaaataatacccagctgcgcacggtggctcacgcctgtaatcctaacactttgggaggtcaaggcaggtggattacttgaggtcaggagatcgagaccagcctggccaacatggg

SEQ ID NO: 1275 - DNA, 359 bp, Homo sapiens
gatattgaggcacagagaggttaaataaatcatccagagtctagaaagtgacagaactgtatttcaaaccagtatcttcttgatttctaaaagtctttacttttttttatttttttttgtggaaaaagggttcgactttgtttccccggctgaagagctgggctgcaccactacactaatgttacctctacctcgcggtgggaggtgtctgtttggctcacatccctgagtgacttggatagcagtatgctcacctccgccttcgcctcatttggtgattggatcaaccacggttttattgtcagattgcccactggggggctatgcttctacttccctacagtctctttaatcagtgg

SEQ ID NO: 1276 - DNA, 201 bp, Homo sapiens
tagcctggcttaatccacgtattgacttgaacccggcacctctgcatgctgggcacacacacatccacacaggtgagcacagtcgtgtgcacctgcacgttacacaggtgaacttttctcatccaggcctgaggtttccactgcatcttaaacacttagccgaggtgtgtcaggaccagcaatgttgtctttgcggccctt

SEQ ID NO: 1277 - DNA, 340 bp, Homo sapiens
gacttccggtcggcgtgagcgtgaggtgtgggtgttcgtttctcaggtaaaacatggctaaaagcttacggagtaagtggaaaagaaagatgcgtgctgaaaagagaaaaaagaatgccccaaaggaggccagcaggcttaaaagtattctcaaactagacggtgatgttttaatgaaagatgttcaagagatagcaactgtggtggtacccaaacccaaacattgccaagagaaaatgcaatgtgaggtaaaagatgaaaaagatgacatgaaaatggagactgatattaagagaaacaaaaagactcttctagaccagcatggacagtacccaatatg

SEQ ID NO: 1278 - DNA, 352 bp, Homo sapiens
  misc_feature (1)...(352): n = A,T,C or G
gacttccggtcggcgtgagcgtgaggtgtgggtgttcgtttctcaggtaaaacatggctaaaagcttacggagtaagtggaaaagaaagatgcgtgctgaaaagagaaaaaagaatgccccaaaggaggccagcaggcttaaaagtattctcaaactagacggtgatgttttaatgaaagatgttcaagagatagcaactgtggtggtacccaaacccaaacattgccaagagaaaatgcaatgtgaggtaaaagatgaaaaagatgacatgaaaatggagactgatattaagagaaacaaaaagactcttctagaccagcatggacagtacccaatatggatgaaccaaan

SEQ ID NO: 1279 - DNA, 386 bp, Homo sapiens
cgttgctgtcggctgggagacacgagggtcacaggcatggagaatggagatggagggggagcccggtccgtgggccccaagagccgagccggacgagggatggagtggggagacgcaggagggcggtgtctagggctggggaatggagtcgtgtctggcaccccggtggggactgtattggaaggcagcccagaatgggcagcggcgaggagtgaacacctggctgcaggtgacggcctgcaggaaggaggcgaagatggccccagggaaccaaagaggctttgccgacccccgggagagggagaggtggactgggaacccctggccaaattccgagcagcctgcgggccagagctggcagacctggtggctgaggagttggcctt

SEQ ID NO: 1280 - DNA, 360 bp, Homo sapiens
gagcggagcccggagcgtcgtggaaagcattggacacatttccaccatgctaatggcattttaaatatatttggcaattttcccaattttttactgaagaaaactgtaagtttatacttgaggactgaagtgtgactctgccgattatcaggctttcaagatgaatctggaaaaactcagcaagcctgaactcctgacactatttagtattcttgaaggaaagcttgaagcaagggaccttgttatataagcctttaaagcccaacacagatatactttcattgaagaacgctatggaaaatataacatcagtgatcctttaatggttctacgagagattttgaacactgaagagaaaaa

SEQ ID NO: 1281 - DNA, 352 bp, Homo sapiens
gggctcagaggagagaactcccagagggtctgggccctccccattcagagcattgagccagaccaggcctgtcgtggtcacctgcatggaatcttctccctacttaggcactgccaggcggaccatcttctggatgagaagggcagggcacaatgtctcctccagagagagatggtacagtctctggagcagcaggtaatgccagggcggtggagggtaagggatagggatagtgcgcaaaaccttctgtccaccatgtgccagaaaccaagttcacctgggacgagggctggtataaaggaaagaagaggagcgggcactcccagggaagaccgtagcctgggcaaagatg

SEQ ID NO: 1282 - DNA, 345 bp, Homo sapiens
ggagcggagcccggagcgtcgtggaaagcattggacacatttccaccatgctaatggcattttaaatatatttggcaattttcccaattttttactgaagaaaactgtaagtttatacttgaggactgaagtgtgactctgccgattatcaggctttcaagatgaatctggaaaaactcagcaagcctgaactcctgacactatttagtattcttgaaggagagcttgaagcaagggaccttgttatagaagccttaaaggcccaacacagagatactttcattgaagaacgctatggaaaatataacatcagtgatcctttaatggctctacagagagattttg

SEQ ID NO: 1283 - DNA, 360 bp, Homo sapiens
ggagcggagcccggagcgtcgtggaaagcattggacacatttccaccatgctaatggcattttaaatatatttggcaattttcccaattttttactgaagaaaactgtaagtttatacttgaggactgaagtgtgactctgccgattatcaggctttcaagatgaatctggaaaaactcagcaagcctgaactcctgacactatttagtattcttgaaggagagcttgaagcaagggaccttgttatagaagccttaaaggcccaacacagagatactttcattgaagaacgctatggaaaatataacatcagtgatcctttaatggctctacagagagattttgaaacactgaaggaag

SEQ ID NO: 1284 - DNA, 361 bp, Homo sapiens
cggggacgagctggaggacccctatcctagacagatgagcttcttctgatatacacgggactcgggggacgctaacgacctaggagtatccaaccagcaccgtaacacacagaaccacttcaactcctgctttctctccatgtgtacacaatgtgacagggacggggtagataagacatctccttcaggtgaaacagctacctcatccctctgtagtgtcacaaacacatccatgatgacatcagagaagataacagtgacaacctccacaggctccactcttggaaacccaggggagacatcatcagtacctgttactggaagtcttatgccagtcacctcagcagccttagtaacagtt

SEQ ID NO: 1285 - DNA, 379 bp, Homo sapiens
ttcgcggccgcaaattcttcttcttcccctgtccctcctccccacccctgcagtttgcactctataagaagatgacccaggcggccatcctgatccagagcaagttccgaagctactatgaacagaagcgatttcagcagagccgccgagcggctgtgctcatccagcagcactaccgctcctaccgccgcaggcccggccctccccaccggacttcggccaccctgcctgcccgcaacaaaggctcctttctcaccaagaagcaggaccaggcagcccggaagatcatgagattcctgcggcgctgccgacacaggatgagggaactgaagcagaaccaggagctggaagggcttccccagccgggactggccacatg

SEQ ID NO: 1286 - DNA, 384 bp, Homo sapiens
ttcgcggccgcaaattcttcttcagcccctgtccctcctccccacccctgcagtttgcactctataagaagatgacccaggcggccatcctgatccagagcaagttccgaagctactatgaacagaagcgatttcagcagagccgccgagcggctgtgctcatccagcagcactaccgctcctaccgccgcaggcccggccctccccaccggacttcggccaccctgcctgcccgcaacaaaggctcctttctcaccaagaagcaggaccaggcagcccggaagatcatgagattcctgcggcgctgccgacacaggatgagggaactgaagcagaaccaggagctggaagggcttccccagccgggactggccacatgacctg

SEQ ID NO: 1287 - DNA, 355 bp, Homo sapiens
cagaagacatctcctgtggggtgaaacagctacctcatccctctgtagtgtcacaaacacatccatgatgacatcagagaagataacagtgacaacctccacaggctccactcttggaaacccaggggagacatcatcagtacctgttactggaagtcttatgccagtcacctcagcagccttagtaacagttgatccagaaggacaatcaccagcaactttctcaaggacttctactcaggacacaacagctttttctaagaaccaccagactcagagcgtggagaccaccagagtatctcaaatcaacaccctcaacaccctcacaccggttacaacatcaactgttttatcc

SEQ ID NO: 1288 - DNA, 341 bp, Homo sapiens
attggaagaaccaacatctataagaataaaaaagattattatgatatgtatgagccagaagaagtgaaaattttcagatgtccatctcctatctactttgcaaacattggtttctttaggcggaaacttatcgatgctgttggctttagtccacttcgaattctacgcaagcgcaacaaagctttgaggaaaatccgaaaactgcagaagcaaggcttgctacaagtgacaccaaaaggatttatatgtactgttgacaccataaaagattctgacgaagagctggacaacaatcagatagaagtactggaccagccaatcaataccacagacctgccttt

SEQ ID NO: 1289 - DNA, 301 bp, Homo sapiens
  misc_feature (1)...(301): n = A,T,C or G
atcaaaaggagacttaagtgattgagaaaaacatagtggaatccggaaagaatgacacctgaaacaaagatggtgagtataataacccatctatcctgtgtgtggttgttttttctcagaatgagggagaagctataaagcaaatatctttatctttatttacaataactcataagtaatataaacactgacttggctcttattataactgtatctagggtaccatgaactttgagtgactgagtgaagatggcagacccatactgtatctaactatagacactttttgaccaataaacan

SEQ ID NO: 1290 - DNA, 179 bp, Homo sapiens
tagtgttttcattcccagatgtcaagcaaagaagtggagttataaatttctcgactagataaacctacaacagcttagaatacatttgttttaaaatgtgattaaattattataataaagttctcataactctaggacaaaactactatctttgtacaaggtatacattttttccttat

SEQ ID NO: 1291 - DNA, 313 bp, Homo sapiens
gtttaaaacattaaaagtaaagggttatataaacattcataagaatattaaaatgtgcttcaaagtaaacatcaggtacatcaaaataaatttaaataattagaagtcattttaggcataaataaaaatgctatctttcatttatccgtatgcctaaaattgtctcttctaagcggaaaaaaaccactttgtttaacacagatttttccttattgtaattagaaatgcagatggaaagactaaattaggcaatggttgacaggaggaaagacatttgctttaaaatcgttgggagtgatttcaagttcaaatc

SEQ ID NO: 1292 - DNA, 332 bp, Homo sapiens
  misc_feature (1)...(332): n = A,T,C or G
agtcaccctgagagtgaaacagatacaaagagagaatgaccctcacagctacagaaagaaatgaaatggggcaggagaagagggggaagaaagctaaataactgatttttttaagaatgccagattaaggccgggcgtggtggctcacgcctgtaatcccagcactttgggaggccgaggtgagtggatcacctgaggtcaggagtttgagaccagcctggccaacatggtgaaaccccgtctctactaaaaatacaaacattagcaagatgtggtgtcacgtgcctgtaatcccagctagtanggaggctgaggcaagagaattcgntgat

SEQ ID NO: 1293 - DNA, 322 bp, Homo sapiens
taaacagcatcatatagtgtataatgaattacaatttgttattatttaacggtgcaattagaactttttttccccacatattggtacctgtaagttaatatcatcctctgtaattattatatagcaatctttagataaactgatttattagttgcctatcaatttatacgtagtaccagggatggatataaagaatagaaacaggtacagctgtggagaatgcaaccatttaagagtgggacagaagttatctctgcagactgtctggagaataaagaaacaaaggaacagaagctacttggaacagaagtgttgatggaaa

SEQ ID NO: 1294 - DNA, 332 bp, Homo sapiens
acttcaaatctatattttgggccctgagctgttgcccacatttcactcacaatgtaatactcagaagcctgactgctttgtctctaccttgtcttcctggcttctgtaatcatttttcccctttttaaaccttttactttgaataattcaaatttatagaaaagttgcaataactggccaggtacagtggctcatgcttgtaatcccagcactttgggaggccaaggcgggtgtatcacctgaggtcaggagttccagaccagcctggctaacatatagtgaaaccccatctctactaaaaaaatacaaaaattagctgggcatggtggtga

SEQ ID NO: 1295 - DNA, 324 bp, Homo sapiens
gtatgtaataagaaaattaactctcatttaagttagtgatataattggaaaggaagtaggagaaaatcatatttataaagaaaaggataaacttaagggtgttaactttttataatagctctaaaatatcatttgtctctacctgtcttttagaaggcagtagtatcctcactctcagaacttcaaaattaagcaaaacacatagatactggaaaagtccccttagcatctccccttagtaatgccttctgagaataaaagtttagtccaaattccagtatttatcaaattcaactgggcaagaatgccagcttctaaacattg

SEQ ID NO: 1296 - DNA, 310 bp, Homo sapiens
gtttcactgtgttggctaggctggtctcaaacttttgacctcagatgatcctccctgagccaccgcgtgagccaccagcgtgagccactgcgcccagccaaaagcttttacacatctttgaaaagtcttctgtgtgataaccattttgtttcttatatatgataaaagctttaatctgttagataataagaaaattctgaagaataactatgattgtgctacatattaatatcaattattctctgccaagaattgcatataacatacttaatactaatattaaatatatctttcttttccttcaattatt

SEQ ID NO: 1297 - DNA, 308 bp, Homo sapiens
gggacaatttgacatgtatgtaaaaagctttaaaaatgtaatgtatattacattatcatacatattaatgtatattacatttaccctttgactcccacaattctactattaaaaatgtatcctatggggaataattacgttttaactataaagctgcgtaaaaatcaaactccgcaagaatatattacaaaccagctttgaaactattaattttactttcttttatagattttcagtgactctttcacaaggaccaattatttttaaaagagttattttaatgtagttaacaataggttgaatttaat

SEQ ID NO: 1298 - DNA, 207 bp, Homo sapiens
tggtacagggagaagtctagctcctgaccaggctctgatttcctcggccctgccctattcaagttcctcaaattccttgaccccaacccttgccccataagaaacctccccatgaccctgaccctgacagagaactggccgtgaaaatttttgcattgacaacagatattggaatgcagggtttccctatctacttcaggccccttg

SEQ ID NO: 1299 - DNA, 334 bp, Homo sapiens
aatccattctcacaaaataaagcaattttaaaattaaaattaggtggtttcattctattgcttatgatcaaataaaacatttctctggctttttcttgcacatagacataatccaagtattttttcacatgacctacaaatctctgaatgatttggtcttttccacttctccagcatcatcgtctacaatcattactacatccctttctctctgcactgacagcttcttccaagcttttttctgcctccagccctttgaattttctcttttcttttcttgatcttgacatagctgagtctttttctttattaaaattgtagacacagcagcatt

SEQ ID NO: 1300 - DNA, 300 bp, Homo sapiens
ctaccattttaaattaatttagcattggtctgttacaaagtgcatataatttagattcagaagaattgggcttcagttatacttttgtcactttctcaatatgtaacctaggataaatcgctccctctttttcaaatttgatgtgtacaaatgtaatatgaagtacttggcaacgtcaggaacatttgataaggcaaggtatataaagatatgtgtgtagccaggcacggtggctcatgtctgcaatcccagcccttggggaggccgaggcgggtggatcacctgaggtcaggaggtcaa

SEQ ID NO: 1301 - DNA, 327 bp, Homo sapiens
tccaaatgaggcaccattcatcacagcttctttctcatttccatctagtgggtaagaggtttctcttcttaaaactacaatttcttaacctttacaagttatttaacattttctatcatattaaattagcaacataaaacattatcctttatctataaacttctagtctggttccctagagtttatatacacgtttttatttctaatctgcaagaaaaaaaattcctatttgttatttggtaacagagcattaaaagatactatacacatgtggtgcatatatatatatatacacacacacacacacacacacacaaaatacacttt

SEQ ID NO: 1302 - DNA, 149 bp, Homo sapiens
ctcacaccatgaagtcaaaccctcaaagatctacagcctcagtgaaaagttggataagaaaaacagtctgctcaccagcactggacgacaagaaggaagcttatctgactctggatgacaaggacgggggaaaagtctcttctaagaat

SEQ ID NO: 1303 - DNA, 334 bp, Homo sapiens
ggctgctttttactcctttgaaaatattatttcatgcattacttctcggtagtacaattgaatccttttctcattttcctagacagttaatgtcgactggacctaaaacctgaaaaggtaatatttacaaatttgaacacatatatctgcctctctgaatatctccatttaaatgtctcttaatgtcttatcagctcttgaaaataattagcaaattgagtagatgcatgacatcataatttctgatctcacctcaaagaacaacaaaagtctactatgaattcaatagtgaattttaatgatttttgcactgcattcattacatctatataca

SEQ ID NO: 1304 - DNA, 333 bp, Homo sapiens
  misc_feature (1)...(333): n = A,T,C or G
acctattttcttattgttttcctgcatattttggaatgatatcttgagattcgtgctttatgccaaagcctcacttgattagggaatattgagtataaaccattgagaaagcaacagtctcttgagttttactaattggtgtgtgtggggtgtgtgtgtgtncntntgtgtgtatgcatatgtggatatgtgtatgtatattaaagatataagtaagaattttggaatatgaattatattttggtttaaaaaaagaggggagttttagttgtgttagttatgtaataaaattggtttaaaaattagggtgaagtggggggggtattttgttag

SEQ ID NO: 1305 - DNA, 313 bp, Homo sapiens
  misc_feature (1)...(313): n = A,T,C or G
cacttgtttgtaaaaggcaagcagaacacacagaaagataattgagttgaattttagcagtatgctttctgcctacacattaaagaataaattattaagacagaatccacagaccccccaaggatatttgaacgtacatttttctgatgagatagcacaacactttgaggagatgctcagagaagttcatgacctttgacaagcaatttctgcattagggaatatactttaagattttattctcagaatacttcaaaataagctataatggtaacaattccctaaattcaaggatttctcatgaattatgccn

SEQ ID NO: 1306 - DNA, 331 bp, Homo sapiens
aatgaccacatttcacaattgaacaggggatattatttcatactataatattatttcaaactataataaagaactggctcctgtagaagagaagggaaattattttctatgatccaaagaattgaaatacatatcagttatagtaagattcaattgtagtagcaaaaacaattggaaactatttaaatgtgcatcaatacaggaaaatggtgacatgtactgtaatacatccatacaaaagaatactgtcggccattaaaagaataaagtacatccttggctgggtgtggtggctaacacctgtaatcccagcactttgggaggctgaggg

SEQ ID NO: 1307 - DNA, 333 bp, Homo sapiens
attttaacagcaaatatctttctttgttagtgatttaaatcagctgactataccttgcttaaatccagcttctcacaaaatagaataaacagcacatggttttatgattgcaccaaatgattcttaaaaattttccctttgataaatattgtttctacctatgtagacataatgtggcgatttggagagtgacattagcttatgatcaaataggattccatgactgaaaacagaaggaagatactttctttcttttcttttttcttttcttttctttactttccctttctttcatggaggtgtacttttgctgcccaggctggaattgagtga

SEQ ID NO: 1308 - DNA, 327 bp, Homo sapiens
tcgaactcctgacctcaggtgatccacctcgcctcagcctcccaaagtgctgggattacaggcatgagccaccatgcccggcctactctttaataagtgtaaaatatctgtgatgaaacaacttagtctttaatcaaacaatataccgtactgtatcttatttttttaaaaaaatccaaatttattaaagttcagagtaatagagtttgaccaaatttcattagcctttctaaaacacagaatgatgtggaaaacataaagggattacgatagggaatctcacttaagatccaaggtaattttggcaataaactaaaaattttcttg

SEQ ID NO: 1309 - DNA, 335 bp, Homo sapiens
ttagcaaaatgcctcttcgacatctatgggatcatttaaaaaatgttttgggggacttaattataattctcctctaagcttttgaagcttagctaagactattacctattctcttgggttttgctaccaccatgtgctagtatgtgacagatgtttagatggctgtgaccaggcagactggtcacttcaaaacttgtttgagccatatgcaagagaaaacataatgtcgagacagaaagctgaaaaatgtgtaaacaataaaattaatttggtaagttatgaccaacagtattctttttaatgagataaaataagtatatcagaatacattgaac

SEQ ID NO: 1310 - DNA, 320 bp, Homo sapiens
gagttttcatttgtggtgagattctctcccaggccacaagacatttcctgctcggaaccttgtttactaattgtaagtactttacaagtaagaacttgttttaaaaacttagcattcaaaaaaaaagctttctttaaaagttatttgattttcttgttttttttcttagcatgttatattttgagtttcagctaaaagactaaggttttcttatctaattgctttaaatttatacatttagtcaaattcaacaatttcttgctaagcattttgccagatgccaggcttttcaaagtagtgtaagatcccagccttgaatc

SEQ ID NO: 1311 - DNA, 335 bp, Homo sapiens
caaccttgacaaatagaattataggagcttacatgttctgattgatagatgagcagactttacaataaaaattataaaaggtagatagatattttatgcttgcattagaaaatatgtaggccaaccaggcagtggctcatgcctgtaatcccaacactttgggaggccaaggtgggcggatcacttgagggtgggagttcaagaccagcctggccaaattggtgaaaccccatctctactaaaaatacaaacattagccgggcatggtgacagccgcctgtagtcccagctactcgggaggctgaggcaggagagccgcttgaaccctggagtgc

SEQ ID NO: 1312 - DNA, 268 bp, Homo sapiens
aaccccactgtaggagcactcttgaagaaaatctgccttaccatctttaacaagagtttaaaaatacttttttctttaaaaggtacttactgatccagccctttataagaagaaaaacccttagtccccattttctaacagtgaatttattaggtttctttaaagaaaacaataataaaagacccaggccaaatctattttaattcataagaatcttctcctaatgaggtgcttcattccattaagcttaaatcaacccaaactgaag

SEQ ID NO: 1313 - DNA, 125 bp, Homo sapiens
tacgttcttctaaaacacatattgtgaattaatagaaatactattgaaaaattggaaacgtaatttgaaatcattcaaaagcaaacgcctccacttgagccctattagaggaatatgaacaaaat

SEQ ID NO: 1314 - DNA, 315 bp, Homo sapiens
atatctcatatactccataaatatatatacatactctatccacaaaaattaaaaataaaaaaatagtaacaaagtttttctaaatttaatagtgttttagaaattaaaagagacccaagaataaaaggaaaggtgaactaagagagatataggttaaaaagaaatataagagaaataagctatgtaagagatacaggccgggcgcggtggctcatacctgtaatccaacactttgggaggctgaggtgggtggatcacctgaggtcaggagttcgagaccagcctagccaacatggtgaaaccctggctctacta

SEQ ID NO: 1315 - DNA, 317 bp, Homo sapiens
cttattgcccactcttaccaatttgacagagacttctgaagataattcgcaattctaattaaggttttctgaaacagttttggcggtggttgttttttggtgtgtgtgtgtgcatgtgtgtatgtggtggtagtgatttctaaaatatatagttttaaacattgaacagtaaaggttagcaatgatatctcttttttctctgtgatttactgtgctttctaatgttctacatttattgtatattgactttatagtcacagaaaacatgttatacaactatgtagatgtattttcgaaggcacgcattaacctatcag

SEQ ID NO: 1316 - DNA, 322 bp, Homo sapiens
  misc_feature (1)...(322): n = A,T,C or G
taaacagcatcatatagtgtataatgaattacaatttgttattatttaacggtgcaattagaactttttttccccacatattggtacctgtaagttaatatcatcctctgtaattattatatagcaatctttagataaactgatttattagttgcctatcaatttatacgtagtaccagggatggatataaagaatagaaacaggtacagctgtggagaatgcaaccatttaagagtgggacagaagttatctctgcagactgtctggagaataaagaaacaaaggaacagaagctacttggaacagaggtgttgatggaan

SEQ ID NO: 1317 - DNA, 337 bp, Homo sapiens
tggagggtgccggaattatctggaagatctgggagcgtcttcactcatacgtccggtgtctgggctggatgactccacggttgtgcgcagctggaggacagctgacccgagtgcccacacgtggcctctctgtgtgacttgggcttcctcacagcatggtggtctcaggacaggcagacttcctgcatgacgtttggttcatcaaacaaggcagaaggtgaatcaccttttatgatctagactcagaagttgcctctatgctggagtgcagtggtgtaattatagctcactgcagccttgacctcctggactcaagagatactcctgcctcagcctc

SEQ ID NO: 1318 - DNA, 323 bp, Homo sapiens
tcatgaaataaagcgtagaagttagtgcacgaatttgttctgggcgtttgttttaatattccagcattttgtttctattgctaactgatgagaaatgctttaaacacatacacatgttctgatgtgtatgtgtgagacttgcgtttcccaacgttgcataacatatgcacaaataagtgtaagatagtgcaaaataactgcaaatagctttatcttacacagaaagacaggtgaacagctcgtctttaatcttaagcataacatttgttttggtaatcttataaagattgcttcttgcacatttttaaagaaaaaatgtgaaa

SEQ ID NO: 1319 - DNA, 323 bp, Homo sapiens
gaggttcattaaattgtaaaaggtcactcagctctttaagtggaagcatgtggattttacataggtatgttaaaatcctcttacacagagcccagactttccaaggtttattctgtgtgtgtgtgtgtgtgtgtgtgtgtgtgtgtgtgtgctcaagttgaggcccagggtgctcacacttgaaagagagaggctgctcggggcaatatagatctaacggggggggatatagaattgaatacgcaatacgacaagacctagcttacgttgtgaaatgaactatctcttcggtgtgcacggtgacacacgcctgttattctagg

SEQ ID NO: 1320 - DNA, 312 bp, Homo sapiens
ggtcagctggaaggagcgtctacaaaagaatcttaatagtattccctatatcattaatgaagacaataatccacaggtatcagcagtagctgtctttattaccaatagacagcattaaaaatgttgacattaccattcttgcagataacctggatttatattcatcaattcattgaactaatcaattttaaaattaaggccaggcgtggtggctcacacctgtaatcccaccactttgggaggccgaggtgggcagatcacctgagttgggagttctcgagaccagcctggccaatatggcgaaatcccatc

SEQ ID NO: 1321 - DNA, 130 bp, Homo sapiens
ggtattacatcttgtaaagtggcttttccggtatagcttttaactgcttgtggattatatatgtgaaggaaagtctgatggcatgataggatgcttactattggaggtgtcatgttataatgctatctct

SEQ ID NO: 1322 - DNA, 267 bp, Homo sapiens
gagccctcctgggctaagcccaaaatttggggctcccctgcaatggatcagaactgtgttctcagagggcaatttggaaaccaactggcaagtgaaaaattttaacagtctttacaaatgttagcacaaagctttcatgatctgagtaggtaatcttaactcatttcatctgcctctgcagatgcaaattggatctcacttatttatttatttatattttttgagattgagtctggctctgtcacccagactggagtgcagaggcac

SEQ ID NO: 1323 - DNA, 334 bp, Homo sapiens
tacattgttcaggtcttctgtgttcttacccaggccccactcaacctttgagctattccagtatgagagtgaattagacctcccactatcacggtcttactgtcatttctcatggcattagtcttaatattttttatatggtaattctatgttcaagactgtgaacatattcaggttccaagttattttgtgttcattaaaaattttactttgaatcattatgaatagttcctaggttgagcttcgggctccctgaccccagagcagtttccatttgcacgtgttgaccatattctctaacccgtcccataaaattgattctactatttcctgc

SEQ ID NO: 1324 - DNA, 322 bp, Homo sapiens
gaatcaacggggagtggtttaaggccattactgagaggcacagagctaccactaatgaagggggtgcgatggcatagagaagccttctgaacaactcagctttcaacatgtgcaagaattactttgacaaaaaaattacaattttctaatttaaaaaaaaattactaagttattgggcttatctaggctctagattgggggatatgaaaatcatttcaagtaattatctcatagtatttcatcccactgactacaaggctacaagagaaacctcccttgggagaaaatgaagaaaaatatttaatagggaaacagactaatt

SEQ ID NO: 1325 - DNA, 313 bp, Homo sapiens
gcatcttcattactgaaaatctaatttgtttctcaaaatcttcgctggaaatattgaactggagcagagaattaaattagctcaaattcaaatgtggtttgctgtcattcgagcaaaattggtctctctcctgaatttctacaacttcctgtccattattttggtggactttcctgaggaaagtggtaatttgctgaaatcaaaacataataaaaatggcccccattttctaggatcttaagcaggtggaactgactttattcaaatcccagaggaaagatgagacacagacttccgttctctgagctggcca

SEQ ID NO: 1326 - DNA, 332 bp, Homo sapiens
  misc_feature (1)...(332): n = A,T,C or G
ggatgggtagctggataaatagatgagttggaggtagatgtggggagagaaaanactcancggggacggaaagcacagggaggaaaaatggccaccagagataacagagcagcctatgctaattaatgatcaactgtgtgtggtttttttcttttccccccctgtttatgttcctccttgttcctcccttctccctagcttttcttccatctcctctcctaatttcatagtttcccatcccattttaaatccccacttttttctccgctccccaaatccttctccactccttctcctttctctctctatcacttccctctcccccatctccc

SEQ ID NO: 1327 - DNA, 330 bp, Homo sapiens
catatgttcctccaagtctaggaaccattgccataaatatcaaccgcctcttcctcgtgagaccacagtaactatgggatgatacaataagggcaagatgaaagatcaaagctttggtgaaggaaagataatggaataaaagacacggctgtgtatcctgtaattaccactatacaaacaggcatcagctttatagtaataatcgtagagcatttattctgcacttcctatatgccaggctttttactcttttatgaacaacatctcacttgtcacagcttgaggctgtaagttgaattatgtgttgcttactaaagatactggaaatta

SEQ ID NO: 1328 - DNA, 331 bp, Homo sapiens
  misc_feature (1)...(331): n = A,T,C or G
ttagtatgctttggaaataaataggattttaacctccagggaaaatcaaattgaaaaagaaacttttgtcaataatttattcaattcaatttaacttctctctgcctttaccataatcaaaatttctgggcactcaaaattggaatctgataaggctaagaaaacaacttgactgatcacacagcagaagtagctgtcttgaactttttctcatgtacttattgtccacatgtatgtcttcttttgaaaaatgtttatattctttgcccactttttaatggggntgtttgtttgtttcttatatatttgntgaagttccaaataggaagaa

SEQ ID NO: 1329 - DNA, 330 bp, Homo sapiens
  misc_feature (1)...(330): n = A,T,C or G
catatgttcctccaagtctaggaaccattgccataaatatcaaccgcctcttcctcgtgagaccacagtaactatgggatgatacaataagggcaagatgaaagatcaaagctttggtgaaggaaagataatggaataaaagacacggctgtgtatcctgtaattaccactatacaaacaggcatcagctttatagtaataatcgtagagcatttattctgcacttcctatatgccaggctttttactcttttatgaacaacatctcacttgtcacagcttgaggctgtaagttgaattatgtgttgcttactaaagatactgggaaatn

SEQ ID NO: 1330 - DNA, 324 bp, Homo sapiens
tcatgaaataaagcgtagaagttagtgcacgaatttgttctgggcgtttgttttagtattccagcattttgtttctattgctaactgatgagaaatgctttaaacacataaacatgttctgatgtgtatgtgtgagacttgcgtttcccaacgttgcataaaataggcacaaataagtgtaaaatagtgtaaaataactgcaaatagctttatcttacacagaaagacaggtgaacagctcgtctttaatcttaagcataacatttgttttggtaatcttataaagattgcttcttgcacatttttaaagaaaaaatgtgaaat

SEQ ID NO: 1331 - DNA, 162 bp, Homo sapiens
ggcttcttccggccgggccgagaggtgggtacattcgttgaaggacaccagctgcggaatttgcggctttggcagattgaaatcatggcaggtccagaaagtgatgcgcaataccagttcactggtattaaaaaatatttcaactcttttcctctcacaggt

SEQ ID NO: 1332 - DNA, 329 bp, Homo sapiens
  misc_feature (1)...(329): n = A,T,C or G
aaactatgcctatcttcacacacacacacacacacacgcacgcacacacacgaacacctatttaggatgcaggaaatatggaataagaaacttttaaagcaagcacagaagaaaatataatttcaaataagggtcagtttaagattgaattttgagaggatgttgaaatacacatgcaatgaaactggaaatagtaagtgaaaagccagacacaaaggatatttgggggttacataaatgaaaattattacaataaaagtatatatggataagaattataattaatggaacatctatgcctaanaaaaaaaattaaaaacctaaaaagg

SEQ ID NO: 1333 - DNA, 328 bp, Homo sapiens
aagttgcctcagaatgagacacactctttgacttcacatgcaacagaaaggcacagttttatttcaaacaaagcagtgttttgctgtaacaccgttaaaaactggaaaggaaaactcaatcaaaccaaaaactagatgcttaggaataaatggtagaattcttacaaaaccaccacgcttcaattcaatctaaatcaattcaacaaatctgtgctgaaagtataacatttagttttcttagacaccaaatgaacaatacaaaatccctcaagggacttagaacattcaagttttctatatctgtggttctaagtctgttaccaacttc

SEQ ID NO: 1334 - DNA, 195 bp, Homo sapiens
tcatgaagcataacatagaattgaatacctgtggagcacaaaacaaataacaaactattattaatatcattgaaataattcctatgtttcttccatgtctcatgctgtcatctttcctgcatcctcactcacagaaaaccatttgtacgtataatttggttatcttgctcttctctttaataattttattaccca

SEQ ID NO: 1335 - DNA, 330 bp, Homo sapiens
  misc_feature (1)...(330): n = A,T,C or G
tatggtatgggagaaagagagagaaagagggcaacacgcgcacacacacacacacacacacacacacacacaaacacacacacacacccccctgtgtgtaacccagctgaaaaagatctgaatcagccagtggttatgagagggacaaaaattggggtatgggggtgtcacaggggacttttttttctttttctctcacatctctggtgggaggaacttttgccttttctttagttgtgtcttctattttgttttctcaggaactggctcagcacagtattttcttaagataggttcttgctttgtcaccgaggctggagtgcannggcc

SEQ ID NO: 1336 - DNA, 308 bp, Homo sapiens
  misc_feature (1)...(308): n = A,T,C or G
agagtaattgtggtgcacctaatttagaagcttttgaacaaagattatcaggaggtaagtgaatgagtcttggaaatacttaggagaagagaattccagggcagcggacaagcaatgcagaggcagaagcataccaatttgtggaagtgtttggagtgcaccagagaagagaagcagaaaagaggtaatgggggcagatctcaaaagcctcatagatcactgtgttattctacagaaatctatgaggacataaatatatgagtacaaaaatgttcttgcagcattgtttgtaagcagcanaaaattaa

SEQ ID NO: 1337 - DNA, 212 bp, Homo sapiens
agatacagcgagattcccttctattgtttacatgtcacggatgaaaacaaaatacgttagtcacttttaatcagttaaaaacattgaatcaaaacaatcttgttgctcagttcaaactatcttcttatcgattattggttttcctctaattataacaccacaaaaaatagctcctctgagtgaaatcatataatagaaaatgacagataatc

SEQ ID NO: 1338 - DNA, 328 bp, Homo sapiens
gagaggaacagtgggcgcaaggaagtcagcttctcagagctcaagagtagatctgagtttaactcattaaagatggcatggaagagcagtgtcataatgcaaatgggaagatttcttctcttagtaattttatttctgccacgtgagatgacaagttctgttttaactgtgaatggtaaaactgagaactatatcctggatactacacctggctcccaagcatctctgatatgtgctgttcaaaaccacaccagagaggaagaactgctctggtaccgacaggaggggagagtggatttgaaatctggaaacaaaatccattcccgcg

SEQ ID NO: 1339 - DNA, 332 bp, Homo sapiens
cggggatgtgttgggacttaccactcttatactgccccgtaaaaagggctttgtttgcgaatcatgagatgctattactttattcgtccccatcataatgtggaatacatgagtttactacaacaactgcatttattctatggttcaggctcacatctatgagtgcaacttcttctaggctgaagcaggagaattgcttgagcccatgaagcataggttgcagtgagccgagatcattccattgcgctccagtctggcgacagaacaagactctgtctcagaaaaaaaaaaaaaaaaaaaattgcgggggcggtttttatctaaataccacc

SEQ ID NO: 1340 - DNA, 317 bp, Homo sapiens
aagtttgctggacaattaccgtgtaaacgtcatgacccgtcagtacctaacactgcttccgtctctacagtagccacgggcaccgcagcggcctcagagcagaaggcacagggtactaccagggaggcatcgcagggcgtcaacaccgaggacctgaggccaccgccttgagccacgccgcgtgcaggagcgggtcctgcgcgttcggccccgggaggcggcctgcagaaaccgtccaaagggctggccttgttgttcgggcacacctctgactgggccccagtttctggagggcaggtgtggggaaggcttgtccc

SEQ ID NO: 1341 - DNA, 244 bp, Homo sapiens
taccaccctgaccagctgacttcacctgccatgtggaaagaagctgggaagagtggggagggtagacctgggaaggggacacagaggagaaaggcaggaacagagacacaaagaaagaaggagacagctgcagagggccaggcacagtggctcacaactatgatcccagtactttgggaggccgaggcgggcagatcacctgaggccaggagttcaagaccagcctggccaacatggtgaaact

SEQ ID NO: 1342 - DNA, 333 bp, Homo sapiens
actctgattctgtctcatctgtggcctgtatgaccacagtcacagcctgcagaaatgttctgggatctggtggctcagccctcctttctccttaaggtgcccataacaagtatacattgagtcaaaaaaaaaaaaaaaaaaaaaaacccggggggggcccccgggggaaaaactttaattttttttggaaacccccttttttggggggttttggaaggcccttttaaaaacttttgggggggccggggaaccttttttaaccccaccctttggggccccccctttttttggggtttccaactaacccccaatttgtggccccgggggttaaaa

SEQ ID NO: 1343 - DNA, 327 bp, Homo sapiens
gatgaagaaagagcttcctgcaattcaaggactgtacaaagctgaaacgcagagattttcatattatttgggagactcagaaatgagcttttaaggttgttccttgacttgcgggtcaataagcgcacaatggtgaagaaaaggctgccttctagtgacacggtgttccggtttgagactccgggcagcccaaggaaggccagcgtggaggcctcacgcagctccacagacagccccagctcggtgttcctcagctcagaggctgagaatggtgtggaggagaaaaagaaagcctgcaggtcgccaacagcccaatcccctacccca

SEQ ID NO: 1344 - DNA, 325 bp, Homo sapiens
gctcctcctcctcccgcgccccccgtgcagccacctgctgcacttgcgcactgggagcgacacgctcgggcataagtagtgccggaaagttagctgccgagacctggtggattgcttttcgtttatcagtgcaggaaaacagcgctatagtactgcgtcacaactagcgcagactccggcagtatttaagcggtgcggcttgggaactagaatccacttcctgtcttccgcctcaggctagagggcgagcgcttcgccgtgggacttcttctgcctggctccgcctcttgccccggaagtactcacagcggacggtggtttttgg

SEQ ID NO: 1345 - DNA, 325 bp, Homo sapiens
cgaccctgctgcccccagtagtagggccaccacacatttacaagagcccggatgagcggctaccccacttgcagccaccacctagggccaaaatgtgctcccagctgcctattacaatagacacaactgaaaccatgtccaccctcctcagcaacagggttgcaatgcagctgctattactcaagcattcaactgggcgcccaagcattccactggatgcgtggggatcaccccacctctgcctaccacagccagcaaccacattactactagggtatatgagaacaggccctcctggacaaggtccaccccaaacctccatgcc

SEQ ID NO: 1346 - DNA, 313 bp, Homo sapiens
ctctaggagcttccaggtcacttctaactgcctgcagctctcccttctcggaaccctgctgcattcagagtggagccgcgctatttagctcttttttcttgtctttttttttttttttaaaaaggggtttccttttgccccccgggctggagggcggggggcaaataaaaactaatggaggcttctacttccccaggataacagaattgcccattttcaacctcaggagagagggggaaaagcggccccccccacatggccaaaataatttttgttttttttcaaactacgggtgttatcacaagaggctccc

SEQ ID NO: 1347 - DNA, 328 bp, Homo sapiens
ggacttccggtcggcgtgagcgtgaggtgtgggtgttcgtttctcaggtaaaacatggctaaaagcttacggagtaagtggaaaagaaagatgcgtgctgaaaagagaaaaaagaatgccccaaaggaggccagcaggcttaaaagtattctcaaactagacggtgatgttttaatgaaagatgttcaagagatagcaactgtggtggtacccaaacccaaacattgccaagagaaaatgcaatgtgaggtaaaagatgaaaaagatgacatgaaaatggagactgatattaagagaaacaaaaagactcttctagaccagcatggac

SEQ ID NO: 1348 - DNA, 300 bp, Homo sapiens
  misc_feature (1)...(300): n = A,T,C or G
ggagcccggagcgtcgtggaaagcattggacacatttccaccatgctaatggcattttaaatatatttggcaattttcccaattttttactgaagaaaactgtaagtttatacttgaggactgaagtgtgactctgccgattatcaggctttcaagatgaatctggaaaaactcagcaagcctgaactcctgacactatttagtattcttgaaggagagcttgaagcaagggaccttgttatagaagccttaaaggcccaacacagagatactttcattgaagaacgctatggaaaatan

SEQ ID NO: 1349 - DNA, 324 bp, Homo sapiens
acagttaccttggtaggaaagtaacgcttggtcttaaattgcttgaggaatgaagacagaaaaaatgttgtgaaaaacaagatgacacaccaaaagagcacatctggaatataaggtccatgatgaccacaagctgaccccaagaatacaccacgaagttttttacattcctggaaaaaaggagaaagaaaaagcagaatggggattcttacgtattcaataaattattatgagcttcattgactcgtaagatgcaactgattgtaagaggcaccattactttgcattccttataaagaaaaaacattgtccagccaactatat

SEQ ID NO: 1350 - DNA, 323 bp, Homo sapiens
aatttttcatgtttcctttgaagtaatctccttaactacaaatcagttcttatcaacaaatatttataaaccaaatatgagttgcttgattatgtttcaaatattaatcatgttctgtgtagaactcttggaatataatatacagcagaagcagtctcaaatgctggagatgcaagtggagctcagcagtatgaaagacagagcaacggaactgcaggagcagctgagttctgagaaaatggtggttgctgaactgaagagtgagcttgcacaaactaaattggaactagaaacaacactcaaggcacagcataaacacctag

SEQ ID NO: 1351 - DNA, 323 bp, Homo sapiens
aaattactctgaaaagagaacaagagagtgagaaaccaagccaagaactcttggaatataatatacagcagaagcagtctcaaatgctggagatgcaagtggagctcagcagtatgaaagacagagcaacggaactgcaggagcagctgagttctgagaaaatggtggttgctgaactgaagagtgagcttgcacaaactaaattggaactagaaacaacactcaaggcacagcataaacacctaaaagaattggaggctttcaggttggaagttaaagataagacagatgaagtacatttgcttaatgacacattagcaagg

SEQ ID NO: 1352 - DNA, 303 bp, Homo sapiens
ggatccagctataacattttgttcacattggatacctgattgtgacatttatttaaaatgttacccattttcaaatttctgagccaatatcatgatttaattatagtggcttcatcgtaagttttagaatccgataaagcaagtcccacttcattagttttttttttctttatataatatgccctagacattcattttttcatgtgaaaaaatgaaatgcagaattttaataaaattctaattatgatggctgacatcacaattaaaatcctgcatttttgtttagagggctctttaataata

SEQ ID NO: 1353 - DNA, 297 bp, Homo sapiens
caggggctccccccagctccctaaggcataacggcctctactcactctacatggtgcatgaggtattggcagagacatgcttagcagcattttgcacataaacaaacactacacgtatgagctctttgtaatacccaggacatgcctttcacacaaattccttcggaatatccttccatttgaatctcacaaccaccaagagggacagaagacaaatactactgcctacattttgtgcatcaagaaactgaggcttaaataattttaagtagcttgccccaaattacatgggcaacg

SEQ ID NO: 1354 - DNA, 309 bp, Homo sapiens
gctggtaatttttgtatttttagtagagactgggtttcaccatgttggccaggctggtcttgaactacaggcctcgagtaatccacccaccttggcctcccaaagtgttgggattagaggcatgagccaccgtgctcaggcttcccacaataatttttactttgacacatacagacttcaatatcacattcgtatgcaccaagctatatgggagaatatctgtaaagattcatgagttgttatgtatagagtgcttaaattgtggacatagaaaataatatttctatccagatgcagtggctcacgcct

SEQ ID NO: 1355 - DNA, 293 bp, Homo sapiens
ataaaccatggtcatttttaggcatgtatcattcatttactcatagtttggtttacttaaattatcaggaatacaatgttgcaatgatgcttaaaaaacacttgttagttttccctgtaccaggcaatggttataattaaaatgatatgctgttgagaagccactcttaagagtccagtttgttttaatgttatgggcagctaccaatttggggcgtctctgtatatttttggaaagattctcattttttatgcttgaagtatttggtgaaaagatgttggttgaccataatt

SEQ ID NO: 1356 - DNA, 308 bp, Homo sapiens
  misc_feature (1)...(308): n = A,T,C or G
aataggagggacacctcatcacaagcacaagctaagggcaccacagccagttatctctttacaaatggtttagtcaccctgagaatcagatgcatgtctacaccctaatggagagctgttaataaagtctgattaataagctatgtcacagagtagtgaattttccgaatgagtgttgattatgatgttacagagaaaaattatactcatgttaaccagattgttgtaagtagtgcaagtccaaatcattcttagtgttgtttttggacttctcacgtacactggccacatctaagaatgaaataatn

SEQ ID NO: 1357 - DNA, 302 bp, Homo sapiens
gagtctgtgaataaaacaataaaagccgtgggttttatgaacagtttcagtttggattttcaagaagcaaaagaaggtgtcaaaagaacgaccaaggaataagaggctttcagaaataaccaagaacatcaaaaataaagaggacttttacaagtgaaaaatgcagtaatcaaaaatgaactcaaaagagagattaaatagattagacacaactgaagagaaacttagtaagtgagaagctctatcagaagaaattatgcctaatacatggagacaaagaaatggaaaatattcaagaggag

SEQ ID NO: 1358 - DNA, 309 bp, Homo sapiens
acagtgagcactctgggtcatgtcagacaattccatttattgaactactctgaatttgctgcctctgtcaatcaaatttaatatttcaactgacataaaaaattgagcaatttttgtttccactttatttttcttttagaacctgacctagttaactggtgactgctactaatgtcaaagttatccgatttttgataaggctagcgggtcctgccatttcatttagagtttattccgcatggtgtatgcaattgttttgaatggcatggtaaagatgttttattaaccctaagaaataagagatccaat

SEQ ID NO: 1359 - DNA, 303 bp, Homo sapiens
attttgcacatgatcctgggaataaagagtcacaggtaaacaaggctgcaagaaaagtccaggtggtgttcacacagtagctgcaaacttctcagaacttttcagaaattcatccttgcctgtcattacattttttaatgagccactcagcattccaacgaacaacccaatacatcatttcctctattaattggtgcagttaatttgaaaactgttctcagttctatatttatatgggaaatattaagagtccatctccttgctcctttttcattaattccacacacattcatggagcatcac

SEQ ID NO: 1360 - DNA, 307 bp, Homo sapiens
tacggatgacaaaagacgagccgaatggtccccatttttaaattttggagcttattcaaaaagcttaaaatacaccatgagccaacattatatgaagcaaactaaacatatctagagatgcagcttggcccatggactattcagttttaacttctgctttaaaggatgacgctcaattggcagttcatacatacatatatatatatatgcgcataaaattcacagacctttggtttacacctgactctgtgacttaccaactgtgtgggcttgagaaagatgcctaacctctctgagcgaaagatgg

SEQ ID NO: 1361 - DNA, 278 bp, Homo sapiens
ggactccaccagtctgaccttagagccccacttttaaccctgtttacccagggcccccaggtacttcaaatctatattttgggccctgagctgttgcccacatttcactcagaatgtaatactcagaagcctgactgctttgtctctaccttgtcttcctggcttctgtaatcatttttcccctttttaaaccttttactttgaataattcaaatttatagaaaagttgcaataactggccaggtacagaggctcatgcttgtaatcccagcactttg

SEQ ID NO: 1362 - DNA, 259 bp, Homo sapiens
ttatgactttgactatattttacaacttgaaaaattttcatttttatggtgccatcagcctgctacttaatagaaaatgctttattgacatttatgttctttacctaatgatgtggatttaaatgatggctgtcatcttcattagaactgactgtcgaaagagtacccagaatgacaataccgaaacccggtctcattttaattgggcaaaccgagaaacataacattgggctgaacatttcaccaatttgactaccac

SEQ ID NO: 1363 - DNA, 415 bp, Homo sapiens
ggcacgagctcaggtaaaacatggctttttgctttttgagtaagtggaaaagaaagatgcgtgctgaaaagagaataaagaatgccccaaaggaggccagcaggcttaaaagtattctcaaactagacggtgatgttttaatgaaagatgttcaagagatagcaactgtggtggtacccaaacccatacattgccaagagaaaatgcaatgtgaggtaaaagatgaaaaagatgacatgaaaatggagactgatattaagagaaacaaaaagactcttctagaccagcatggacagtacccaatatggatgaaccaaaggcaaagaaaaaggctgaaggcaaagcgagagataagaaaggggaaaagcacagcaaaagcagtgaaagtggcaaggggtttggcctggtatactcg

SEQ ID NO: 1364 - DNA, 386 bp, Homo sapiens
  misc_feature (1)...(386): n = A,T,C or G
tatttaggactttaagcctcttttctgcctatctcacatatcattttgcaagtcttcttggaattatttaatttacagtattttgataacttcaaagctggtaaaatgaaattagagctatctgcttgtgctcagaaatcaattctcatcaaataatatgaaattatgttatctaaaagcatttaccctattaagtgacagacaaatgagaagtaaggagacttaatacactgtttgcctattgatgacactggccacaaacatcccactctttacaagcagtaacagggaagggagtcttttgaaaaaacaatttgngccgggcatggtggctcacgcctgtaatcctaacacttttggaggccgaggcgggccgaacacgaagt

SEQ ID NO: 1365 - DNA, 378 bp, Homo sapiens
tttataagtatacctggacagaagaaatacaagataccgttctattaactcaatatagtgttgctaagttcgtacttgtgcttggtttattttattttataaataggtatcactcgcatggttccaaatgcggtaggcacagagagtatatatgatggaattacatcctccttccctgcactcagcaaccgagatcatcccgctacgggcactcaaaggtttcattgtctgaaatattagcctaaacgtagtttatgtttaggaagcaacaaccgtaaataggcccacatccaaacggagtggatttaggtttcactttttcaaggaaaaaccatcaaagaatttttccacatacttataaaccatcccacgtataga

SEQ ID NO: 1366 - DNA, 378 bp, Homo sapiens
ataactaacttcttttggtcttcccacatttaataacctctcgatcagagcctttctttttttatgtactcaaaaataatagaaatgccatttttaatatttaccaataacctatttaacttagtaaggaactgcttcccctgggggttagaaatttgtacacagccttctggatacaaataatctttatttaattaattaatttatttgttttttgagatggagtcttgctctgttgcccaggctggagtgcagtggctcgatctcgactcactgccatctcgccacctgggttcaggtaaaaaattctcctgtctcagcttcccgagtagctgggactacaggtgcatgccaccatgcccaactaatttttgtatg

SEQ ID NO: 1367 - DNA, 395 bp, Homo sapiens
  misc_feature (1)...(395): n = A,T,C or G
cgttgctgtcgctttttagcatcttaaaatttatttttatatgagtgcctgtagatttgccgtatcctttaaaaaacaattattttaatatatattataattgtacatattttcggtgtgcatatggtgaaagtcattggagtggaagatagcaaggagcttggaaattgaaaaggaattcagaagttgttgatgaactctgaagttatcagcatggatggttgaatggcatcatagacaactatctagagagacagtacttgctttacttttggaaatcagtgtgctggcattaaaactcagggacttgaaaatgatggacacagccaaagaatatagtatggtgcctggggtgtanggagtggagggagatattcatgcattctgtaatctgg

SEQ ID NO: 1368 - DNA, 393 bp, Homo sapiens
cgttgctgtcgaagtaactgggcagggatggttagctgggaggtatggatttcatttccattactaatgcctgcaattgctgataatagacgtgccccaggaatcgctgcaagggaaatggagcaagggtctccttctgtggcccagtctggaatgttagtggtgcaatctcgactcactgcaacctccgcctcccggattcaagagattctcctgcctcagcctcccaagtagctgggattacacgtacgcaccaccatgcccggcaaatttttgtatttttagtagagatagggtttcaacatattggccaggctggtctcaaactcgtgacctcaagtgatctgcccgcctcagcctcccaaaatgctgggattataggcgtgaaccatc

SEQ ID NO: 1369 - DNA, 388 bp, Homo sapiens
cgttgctgtcgaagtaactgggcagggatggttagctgggaggtatggatttcatttccattactaatgcctgcaattgctgataatagacgtgccccaggaatcgctgcaagggaaatggagcaagggtctccttctgtggcccagtctggaatgttagtggtgcaatctcgactcactgcaacctccgcctcccggattcaagagattctcctgcctcagcctcccaagtagctgggattacacgtacgcaccaccatgcccggcaaatttttgtatttttagtagagatagggtttcaacatattggccaggctggtctcaaactcgtgacctcaagtgatctgcccgcctcagcctcccaaaatgctgggattataggcgtgaa

SEQ ID NO: 1370 - DNA, 366 bp, Homo sapiens
tggggattcaccgtgttgggcaggctggtctagaactcctgatctcatgagatctgcccgtctccacttcccaaagttctgggagtacaagcgtgatccaccatgcccggctgaggctaggattttaattatattccaacatttcttactctcttcattattactccccaaacagcctttttaggcattttcctcctaggttctgcctgtgaaaatttactactacagattattgtatgtctgtatgtatgtaatgtatgtatctgtgctttatacataaaatgattacttttgcccttccttcgcccccgctcttactcccattagcgggggtttgcttccattaacaaagatagctgggcctgg

SEQ ID NO: 1371 - DNA, 390 bp, Homo sapiens
ctttggaagaatgcctaaaaagacgaaagttggcaaagcagcctgaaacagtttctgttgctgaactcaaaagtctgttagtactcacaaggaaacactttttagattattttgatgctgtgattcctaaaatgattctaagaaagatggacaaaattaaaaccttcaatatattaaatgattttagtccagcggaacctaattcctcaagtctaatggaaaccaatcctctggaatggccagaaaggcatgttcttcaaaatttggaaacttttgaaaaaactaaacaaaaaatgagaactgggtcattacctcattcatctgaacagttgctgggccacaaagagggacctcgggactcaatcacattgttggatgctaaagaattgg

SEQ ID NO: 1372 - DNA, 391 bp, Homo sapiens
ggcacgagggcaggaggccagatttggtcctcaggctgtaatttcttggccccttgtctagggagaggtaaacgaggggaggagagatcagtcaaggatgacgtgagggtttgctgggagcaccaggaatcctggagaaggtagtggcaagagggtgcagcaagctcagctgggcggggatcaagtctgaggacttaatgtctcctctgatctccagacccataagggagatgctgagtagacaactggggcttatgggtctggagttcagaggagagatcgggaaggtgtccatttggagtcatccacgcagagatgtgtgaaggctgctcaatgattttgaggtttaaagaaaaaaagagatgtgaaaccaggggccctgatgaggctg

SEQ ID NO: 1373 - DNA, 386 bp, Homo sapiens
cggtgctgtccaacacatattgtctggtttttaacaggagtgatacagaatggcaaagcttgatccatatagtaagagaatacaattattgtcgagttttaacaggagtgatacagaatagcagaggggcctgctgatgaattgaaggggatccaataaagagattactggaataataaagatgatcaggacttacactaaaatatttgtgataaggatagagaaaaagtgttaatgtattgggggaaatcacaggatatatcagctgaatgcttatgtgaaatgagaatgatgaaaagtacttaaatggagagatggcatcggccactgtattactctgtgctcacattgctataaagaaatacctgagactgggtagtttataa

SEQ ID NO: 1374 - DNA, 383 bp, Homo sapiens
cgttgctgtcgcacacacacacttacacaatggaaatacaatatatatggtgaactcatttacaatacgcgattaccagttttccatgttagtttttctacccttacctgatcatttttacgactacttaaaatttctctgctggatcaacaatattttatctacatcctatcaatggctcacttttaggtagcttcccatatttttactcttacaaatgaacattatggaggaacacctttgagcatatacctttctacacttgtccaagttttctctctctctccccccctttttttttttcacctgcagacacagggcaaccaagttgtcgtcttcaaattaatttctcagagtctactctctggataataggggtgagt

SEQ ID NO: 1375 - DNA, 385 bp, Homo sapiens
cgttgctgtcgggggaatatgtcctggcactgaagcaagagctacgaggagccatgaggcagctcccctacttcatccggccagctgtccccaagagagatgtggagcgttattcagacaaatatcagatgtcaggtccgattgacaatgccatcgattggaaccctgattggcggcgtctaccccgggagctaaagatccgagtgcggaagctacagaaggaacggattacaattctgctccccaagaggccccctaagaccacagaagataaggaggaaacaatacagaaactagagaccctggagaagaaggaagaagaagtaacttcagaggaggatgaggagaaagaagaagaagaagagaaggaagaggaggaagaaaa

SEQ ID NO: 1376 - DNA, 380 bp, Homo sapiens
cgttgctgtcgggaatgggtcttagtatatcccctatcttccctttccactgccctcacctagtcttcaaccctgagtaatggggtgttcatagaactctaatggggtgataagatattttatagaagtagaatcttgatctgacctctccttctaattgggaacgtctatgttctaactagcagaaattcctcaaagtttctggcatatggaaaattttccctctatttttattcctttgatcatttcaatgtgaatttagaatgaggcaatttagaagcctgtcctcgcaaagccattttatttaaaaaccacaaaataacactttttttctgtgtgaagaaggttagaaaaaaaatgctcaagactcataattatat

SEQ ID NO: 1377 - DNA, 369 bp, Homo sapiens
cgttgctgtcgctgggacttgttaggcattaacatatattagtcaaacgagtgactccttacaaatataaattcttttaggtgacatgggaagtaaatatggttttaattgtagcaccccctacagggctgttatgcagaaaagagtagctaataggctggaccctagaagttgtactgtttctggtggcacaaagaatttctttccaaggttctgatgactcttttttattcctaataagttcttaaatggttatgttcatagcttgaggttcaggctgcacaaagaagttactttcatggatacagttagaacttctactatgggctataataataaattttgcaccataacctactggcagggctt

SEQ ID NO: 1378 - DNA, 342 bp, Homo sapiens
gcaggtaatgagactgcagaaaggctgaaggtagattaggataagatcaatgaaaggcttttataaagcagttttgaattgtcctttagaaaataagaagccataaaattttattttttattttcaaaaagatatttctaacccatattagaaatggattagaaatagataacatataacatttggagaagatagaagagttagggcctataggaatagttcaagcaaaaatcatcttatcttaattttggatactttctaattacttcctatcttgaataattagataacattaatcatagtggacacatgcatacatatgtttattgcagcactgttcac

SEQ ID NO: 1379 - DNA, 362 bp, Homo sapiens
cgttgctgtcgcccacacagggcacagaccccacgcaccccacacggggcaggcagctcacacagggcacagaccccacgcaccccacacagggcacagaccccacgcaccccacacagggcacagaccccacacaccccacacagggcaggcacctcacacagggcacagaccccatgcatcccacacagggcaggcaccccacacagggcacagaccccacacaccccacacagggcaggcaccccacacagggcacagaccccacgcaccccacacagggcagggatcccacgcagggcacagatcccacgcagggcagggccagcccaaggccaggcccctcccctgtagatatcctg

SEQ ID NO: 1380 - DNA, 318 bp, Homo sapiens
gatgtgtgataacacatgcaaccacgcctcacctcacctgagactggtggcccagagtttttcttaatggccatcacatacgcatacagtgcctgcatggctgacctcagttactgaagctgcagccagagagggaacttaggtcttcactgtaaatcacattgttaggataaactaaatggaaaaactaaatgaagtacagtatagctgaagacctcccagcaggcaaaatgctcttatcagtcagaatgtttcaagggctcagttccaaggagccagccaagggccagtcatgaaaacccccattcattggtaatg

SEQ ID NO: 1381 - DNA, 318 bp, Homo sapiens
tctggggaataaaaagcactaatggacaggagatgggttttgcaaaccatgaaaggccatgtgcagctgagctggtattatcactggagcctggcacttcgccttcatctgtggtttcctctgtgtcagtgaaaccacagccactagacggggagcaactcaaggtggggcccggggtgaggagctggagcctgagcccccagtggagaagtgagtgggggtctccagctaggaaggaaagggtgggaggtggagagcagccccagggggcagtcactaagccccatgcagggcagaatgccaggaacacaggctcca

SEQ ID NO: 1382 - DNA, 311 bp, Homo sapiens
ggtactcacaagttaacaaacttcaaaatgctatttgaaagggaaactaataacattaaaaagaggtcacagtactgtttgaaaatctacaaaggagtcatgatctttgttcaaggaagtaaaatattaaggaaatttgtgttagttgagttcttgactgaacatgtgctatgaatttctgattgtggaagctgcttcctattcgaaaataaaataaaactctcttggtatgcaaatgataagaatatgttttggtatctaacaatatctaaaagcaaactctctgcaaagtatcccagaatggtttactt

SEQ ID NO: 1383 - DNA, 405 bp, Homo sapiens
attgttatccgaaatagagaaataactcctgttaatcaagaaaaagacagaaacttcaatgggaaaaaaaggaccaatgaaagagacaaactaccatagatcagatttcttcccatagctaaacagtatacaaagaaacttcatatttataattatacaaatgcaaatcaaggcagtgagtcattactcttatcagaaagactctaatttaaaaggataaacacaacaattattagaaaatgtgcatagtgttaactttcactcacttgtagtgaaaagtagtctggaaatattttatacatcatagagaaattccgagaatcatatacaggtagatgatgataaggaatatggtattgcttgtggtgacagtcatttggtggcactctcatgattggtggcaat

SEQ ID NO: 1384 - DNA, 425 bp, Homo sapiens
aagctacttcatagagctgacattctagggagaagatagacatggcagatttaattatacacatatctttttcactgtattagattttttcagattataaaattatagtaataaaatagcaatatcaaatattactgaaatacataacataggaaaaaatatgccctgtcaattcatcctccctccccagacgtagccactgtcaaccagtttgtgcacgtttttgtaacttttaaaaatatacatgcaatgtatttttaaagcataaaaggggaatcatacacgtctgaattttgttttttagcttcatatatctgggatatcctctcacatgaacacaaggaaatctacctcattctttttaatgtctgaataatatttcatgctatggatgtattatagtttatttgactaatatcttgttg

SEQ ID NO: 1385 - DNA, 388 bp, Homo sapiens
agaatactaggtattaagtaaatattgtttgagtagataaaagacattagtgttaagcaataaccctacattcttaaaaaagagagagttttattaaattgctaggaacttaaaatttttggatctcacattccaaatgcataacacaagattttgctttcagtgtgtatcactcaaaattaagctagtaacaggtaaactagctatgttccctattcttatttcttggatatgaggagaggaaacacatgcagcaggaaagaaaaaggtgactaacaattactaaatttcgagagtaaattggattgttttgctctgtgcaactataaaatggtgattaacaaacaggtgctaaatgttaatgaagtatatgagattaaaaataaac

SEQ ID NO: 1386 - DNA, 388 bp, Homo sapiens
  misc_feature (1)...(388): n = A,T,C or G
gatttttgtggtgagattctctcccacgccacaagacatttcctgctcggaaccttgtttactaattgtaagtactttacaagtaagaacttgatttaaaaacttagcattcaaaaaaaaaaaacctttttttacagcttattgaattctctggtttttttctaaccaggtaatatttggagttgcacctaaaaaactaaggtttcttaatctaatggctttaaattaatcctttaagccaaattcaccatttttttgttaacctttttgccaaaggccaggtttttcaaagaagggaaaaaccccacccttgaaccctcatcattggcggttttcggcgccaaacccatattatccttgtgtttaagaaccaggaccattatttccn

SEQ ID NO: 1387 - DNA, 421 bp, Homo sapiens
ccatcgattcgaattcggcacgaggttgccatactcttgcatacacaatcggttatctagtttttgattgtttgtgtgtatggtgtgtgctgtctctctgaccagatttcaggttcctgaggcgagcctgcagctcatactgctcatctgtcctctcctgtggtgggtgctcagggcctctcactgttagttactccctcctttctgcccagttctgcactcaactagtagaagcagccatcctttccccaagcaggaaatagtagtggtcgcccttaagagcagtgtgagggcagaagattaagggaggggaagagtccctggaactggaagaaggtaaatactttgccttgagagggcgccgaatcattttaccacaatagtaaatggaaaaagtgtcaaaggttgggactacgtttag

SEQ ID NO: 1388 - DNA, 415 bp, Homo sapiens
cgttgctgtcggccattctttggcgagattatcatttcttgctgcaaagatgatttgagacactaactacgttgttaaatgccccaaaattaccatgatttccatcatagtttaagtactcagtttcattattgttggtctcaaattcagagatgaataggaatgatggataggatttatttaagtatatatcttaggtatacatttatttagtgcgggctgattaatgtgaaagttaaggtataaaacctagagacaactttcagggaaaaaaaaaagatctcttattaaatgttttagaagtagggattcccattctatattgaaaataacataatttcaccacttggttattataattttttggggttgggtgaacatttattaaaacaaatgtgtgtggtctgacaaaaag

SEQ ID NO: 1389 - DNA, 417 bp, Homo sapiens
ggcacgagggacagcgaagccaaagaggacccctcaaacccaacaagagctgtgcggctccctgattcctcgccagtgttgctaccgcccttggctcttcttgcatggctggctcttgagacccctggaagctgatggaggcaacgtgagaagcacatggacatccgaccttgagcttgagaggcagaggcctgagttctagttacagccccagcagtaccagttgtgtggactgggagggaggctatcacgtacatactccaagcctccaagcctgtttccccttctgacacaggatcttttgtggctggtatagagtgggcactcaataaatgctgtctgtcgtctggctggatgcctcatgggcctgagaattgaatagaattacagtgatagaagcatgctggtattgaagtg

SEQ ID NO: 1390 - DNA, 203 bp, Homo sapiens
gggtaaatcttcaggtaagtgttcctggtgcctatgttgtgaaacacaaaaaataaccgaaaaatttaagggggcggttttttttgggggccccaagatgggaatatcctttgggggggtggggcccaccccccaactgagggtggggaaaaaaagggttttttttgaaaattcggggggcttctggtttgttttgacccatt

SEQ ID NO: 1391 - DNA, 411 bp, Homo sapiens
cgttgctgtcgaaaaaagaaccccgtgtgttgtaaatcaaggaaaaatgttgggtaacagactatgacttgactttgtgcttatatcatgattgtatttaattttattataagttggttaaatatttgagactttggggaaattaaacttgtcaagctgtcaacttatcagtttggatttatggtttcctatttcattttgtagatattgaaaatacatgtcaatatctgtgtatttcatgtcaaggaagctgtgtattggtatcaggattgagggaatacatgatcaacaaatacttttccaagtttcagtgtcacagattgcatatggcatgataatacatcacattcatttccctcaagtttgtttttttttttgacagggagttaacaaaaaatgtgcaaatggcca

SEQ ID NO: 1392 - DNA, 383 bp, Homo sapiens
attcacccatccacccatctactcatccatccatccaaccatgcatccatccatccacccatccacccattcatccatccatccacccaaccaaccatccaccttttcatctatccacccacttgtccacccacccattcctccattcatcattcaaccctctcttcctaccatcactgtttcatccatgaagatttataaagaagtgtaacatttggagtttataaaccagtatttgagacctaattctaattctttccgcctgtgcaatcttggacaaatagttaaaactatctacattttttgtttattctttggcaaaatgggagagagtgcttatctttacattatgaaactactatgagaaagagatgattcagctg

SEQ ID NO: 1393 - DNA, 407 bp, Homo sapiens
  misc_feature (1)...(407): n = A,T,C or G
gattcgaattccgttgctgtcgagcagccaccagagattgtcatgaaaaatgaaaagtcaaagaaaaataagaagaaatcatagtcagatgctaaagcagtgcaaaacagttcacgccatgatggaaaggaagttgatgaaggagcctgggaaactaaaattagtcacagagagaaacgacagcagcgtaaacgtgataaggtgctgactgattctggttcattggattcaactatccctgggatagaaaataccatcacagttaccaccgagcaacttacaaccgcatcatttcctgttggttccaagaagaataaaggtgattctcatctaaatgttcaagttagcaactttaaatctggaaaaggagattctacacttcaggtttcttcaggattgaatgaaan

SEQ ID NO: 1394 - DNA, 237 bp, Homo sapiens
atttacgtgccatgattttattccaaccaaaaagatatttggaaaatatttaagaattattgctgattattgaaatctagaacactaataccagtgaatattttgtataccctaatacttctctgatcacttacaagccaataattagccattcacgatacagaagacagacagggtagatgtgggggggcggttttttgggtaattccggaaagagagaaaactttgggagggtga

SEQ ID NO: 1395 - DNA, 376 bp, Homo sapiens
ctccatatatatatatcaatacattttctaagggttgaaactaagttttcactgacatttatataaataacctaaaatcttggcactaggattatttacaaaggtaaaacctgaattacaaatatttggcaaggagaaaattatactttctgtctttcttcccaaatcaaaatcatcttctatggggcggcatccccacctcagctgtgtgaacggtggccccagaaaaaataaggtcaaaaaaaattaaaaaaaaataatcttctggccgggagcaatggctcaatgcctgtaatcccagcactttgggaggctgaggcgggcggattacctgaggtcaggagtttgagaccagtctggccaacatggtgaaacc

SEQ ID NO: 1396 - DNA, 158 bp, Homo sapiens
tttttattatctcctttctacttttttggcttactttttgttctttttctcaccttcctgcttggatgattaattaatttttattaattcttttagtcctattttttttcagtgattaaggccatgaatttttctgtgtgcaaactatatcctgagac

SEQ ID NO: 1397 - DNA, 406 bp, Homo sapiens
ggcacgagaggaggcaagtcaatcttttttatttccttataaaattaactcttcaaaagctgttaaacagagagttatcttaatttttattgcagtaggaggaaatatatttaaaatatttgtagatttatagcaaatagagactcgttatttaaaggttaaataacaatttgttcttttgttgtttttgccagtttagggcagtagctgcttttgtcataaatatcttcctaccacatcaaaaatgctgcttttaaaatttttgtttataaattgagaaggaattttctctctataagtttctgtcattgaacagatcaccattaaaaagaatattagaatccagcatgaagataatggctaataaaaatgaggtacatactttataaaaccattaatcagattt

SEQ ID NO: 1398 - DNA, 374 bp, Homo sapiens
accaccacgcttcaattcaatctaaatcaattcaacaaatctgtgctgaaagtataacatttagttttcttagacaccaaatgaacaatacaaaatccctcaagggacttagaacattcaagttttctatatctgtggttctaagtctgttaccaacttccaggactctgcttctttccctctgcccattaacaatgcggtgttaaaagtgacttcctaccactatgtttcttacagctgattcaaccactcatctcatagccaggcatgaaagaaaggagcatacccctaaccgagaactattttttagatggtagtcatatatttatttcatatttagtaagtattatttcaggtcttattaattaaaggaa

SEQ ID NO: 1399 - DNA, 402 bp, Homo sapiens
cgttgctgtcggccaattcagggtctcaagaaagaacagcccacaggattgacactgaaccttaacaaagttaacaggaccaagctgcagagagggtgctaggacagcgaagccaaagaggacccctcaaacccaacaagagctgtgcggctccctgattcctcgccagtgttgctaccgcccttggctcttcttgcatggctggctcttgagacccctggaagctgatggaggcaacgtgagaagcacatggacatccgaccttgagcttgagaggcagaggcctgagttctagttacagccccagcagtaccagttgtgtggactgggagggaggctatcacgtacatactccaagcctccaagcctgtttccccttctgacacaggatcttttgtggct

SEQ ID NO: 1400 - DNA, 399 bp, Homo sapiens
ggcacgagccttcgctaccctgtctgcacgtcccagcacccaggtacccagcacaggtctggcgagagggtagagatggtggacctcagccagaagtgggccccactgcagcccacacttctctttacagccgaggccagactcttggggtgaggacaactgggagggcctcgagactgacagtcgtaagtgcttcccctgggtgggctgaagactagggctccccgactagcccgcccctacaggcccccggcaggcactggctggagagctgagaccggggctccccttcctgacgccaggacaggtcaaggctgagctggcccggaagaagcgcgaggagcggcggcgggagatggaggccaaacgcgccgagaggaaagtgggcaagggccccag

SEQ ID NO: 1401 - DNA, 403 bp, Homo sapiens
catcattcgcgcggccgcgaattcttccgacagcaacggttccttactaaaagaaataatcaggaataaaaaaaagaaataacattgttggggagaagagaagggaattaacatttataatacttttcttgcttatttctagtgttttcaaatttcctgtggagagcaaaatacttctacattaaaaaagcttttattgtctttgttgaaaataagatacaagaagtagactttaatttgaaaaaatataatgtagtgaattagattaaaatgtttatgtatgaggaaaataggcccagcatggtggctcatgcctgtaatcataacgctttgggaggccaaggcaagaggattgcctgagcccaggagttcaagaccagtctaggcaatgtggcaaaatcct

SEQ ID NO: 1402 - DNA, 377 bp, Homo sapiens
aggagacaagggtacagactgtgagtctagtcagaagtgatgcacatggctcagtggatttaggcaagtcatttcagtgtttgtacaatgggaatagtaatataatacatacttctgagaattatataaaaaatgtatgtaagatacctgtgatcatttctctttacccctaactatactataagtttctgagagagagggaaaaaaaaacataccttatacatatctttatattcctattggggcttaaatactttgcacagtgtgtgattaataaatacatgtgcataagtgtaagcatgtgtcagcatgtgtgtgtcagcatgtaagtgtgtgtgtgttcagaagatttaggtgtcttagaatagagctgataa

SEQ ID NO: 1403 - DNA, 402 bp, Homo sapiens
cgttgctgtcgtagcgcgcgaggccctcggtcggacgggacgctcgggattcagggactgcctcggcacacgggaagttgccctacaggcgcgggagaaagcgcaggcggcggcttagcagggagaggcaggctgcagtgcacattgggtcaggcacacgcgaggggcagcccccgagggccgtcccagagtcccccgcgccgccggggtcctaacggggtgcaccgtcttccgccgcacgtggattcagcgcgatgcccaaatccaagcgcgacaagaaagtctccttaaccaaaactgccaagaaaggcttggaattgaaacaaaacctgatagaagagcttcggaaatgtgtggacacctacaagtaccttttcatcttctctgtggccaacatgagga

SEQ ID NO: 1404 - DNA, 406 bp, Homo sapiens
ggcacgagcctcttcgaagcccatgttattgaccgactgaagctgctggtgctgtacaggggagaggatgatgagctgctacagcgggcagctgccgggggcttggccatgcttacctccatgcggcccacgctctgcagccgcattccccaagtgaccacacactggctggagatcctgcaggccctgcttctgagctccaaccaggagctgcagcaccggggtgctgtggtggtgctgaacatggtggaggcctcgagggagattgccagcaccctgaaggagagcgagatgatggagatcttgtcagtgctagctaaaggtgaccacagccctggtccaagggctgctgcagcctgcctggacaaagcagaggaatatgggcttatccaacccacccaagaag

SEQ ID NO: 1405 - DNA, 363 bp, Homo sapiens
gcaacacccttctgatgacatttcccattaacctcagaacctattgcaagagtatatacctctgttaaacaagcagaatatcaaccaaacagcaataaaggaagattaggttgaaaaagtgcacatcagcctcccttggaactctgaaatgtagattttatggaaaaaataacagctatttttaaaaaaataatttttgtttcgagcaagtaaaaaatatttatctcttagtatattaaattacagattgaatatggcatggttagtctgtgaattctcacagtattataagtttatgaaatagactcttctcaagaattaaaatagaagttctatgggccaggcaagggggctcacccctgg

SEQ ID NO: 1406 - DNA, 370 bp, Homo sapiens
  misc_feature (1)...(370): n = A,T,C or G
ataacaacagtaataaggaaaacaatataacaataacaattctaaaacttcatattgtccatgggtctgtatctctctgtgcttatgcagccatattgtcaaaaaatatatatgctgtctctaatttatgcatcatatattttttaaattatcgtagttaattttgtacctaagaagtaaacctaatcgttaagtttaaaagacaacagcaaaggagatcttttaaatattcattttactggaactttattgatcatttgacatttttgcagatttcctccttgaaatccttttatttaaatgatattaattattggcttctttttgattgctttntaatgactttagattatattcttaagaactttta

SEQ ID NO: 1407 - DNA, 316 bp, Homo sapiens
cattggttctaccaagcataagcaaatcaaacaactcattgagagaatgtcatcagccaataaaataagaaactgctcccaggccctgaatcagcttattaaaattgacctctgggactagcttctcctaatacataaaattataaaaaagacttagacacagaacctcaagtctgttctaccaggaaattttacacaagtattccagaaatcaaccaatcattctaacccattagtggtattcagtaagattgaaagtattcaataaaatcagaacaaaatgtctcatacaagatttcctggcagggcatggtgg

SEQ ID NO: 1408 - DNA, 369 bp, Homo sapiens
  misc_feature (1)...(369): n = A,T,C or G
gatatttttcttctgtttttagtatggcagtatacaaaaatgtatatattgattttttatgataaaaatttgatcacacaaaattaataatatttgtaccatcaaattgtcttacttctaataacagaaagaagtgtcttttgaattactagaatacttttatttttgagcgcttaaaaattttttcaacatttatactgaacgcttcatttgcttattgcattgcatcagctaaaatctccaaaaatattgttgaataatactgaggatggcagatatcaatctttttctgacagcaatgaaaattcggattgcattataaactatgtttgctcctagttntgcggcaaaatgtatttatcaattttc

SEQ ID NO: 1409 - DNA, 398 bp, Homo sapiens
cgttgctgtcggtgcatgcctgtaatcccagctacttgggaggctgaggcatgaacatcgcttgaacctgggaggcagaggttgcagtgagccaagattgcaccgctgcactctagcctaggtgacggagtgagattgtgtctccaaaaaaaaaaattttttctttgcgactgtattcctaattttatctacatacataattcacttgccactcttgactgtcttacttattctgtttgcaaattcatgtcatggtttatgtatcacagtgcagtcccatgagttttttagacaaaggattagtggataagccaagagacctatacccttcactatataggatgcaggtgtttcaaatgctggatgtaagtggtaggcatggtggctcacacctgtag

SEQ ID NO: 1410 - DNA, 371 bp, Homo sapiens
aggtagataccacttttttcacaattactaaaagccaggcaaattactagtattttacatcatcataactcattaatccctcacaaagtcctataaatttagtaatgaaattaaaatcccctgggagtcagaaacatcccatttgtgagaaatacacttttcaatttatgccaaccaaaagcagaataaaattttaatttatgaatttttaagatgagaaaagtggggcttagcaatgctaactaatatgtgcaagtttgtgcagttataaggaatctgattcataatcacttttctccattgcctccacggattaaaaaggtgttcccagccctgcagtttttcttacagagctcagttccttaactacc

SEQ ID NO: 1411 - DNA, 396 bp, Homo sapiens
  misc_feature (1)...(396): n = A,T,C or G
ggcacgaggatcagtcaaggatgacgtgagggtttgctgggagcaccaggaatcctggagaaggtagtggcaagagggtgcagcaagctcagctgggcggggatcaagtctgaggacttaatgtctcctctgatctccagacccataagggagatgctgagtagacaactggggcttatgggtctggagttcagaggagagatcgggaaggtgtccatttggagtcatccacgcagagatgtgtgaaggctgctcaatgattttgaggtttaaagaaaaaaagagatgtgaaaccaggggccctgatgaggctgcccaggtggtaaggaagacagaagagaagccatgggacagctgagcccgggcaccctcaagccttggaggcatgaagtttgn

SEQ ID NO: 1412 - DNA, 396 bp, Homo sapiens
cgttgctgtcggcggtgctgtgtcctgcaggaagagcgggatgcagctcgggctgggcaactgagtgagcatcgagagttggagactcttcgggctgccctagaagaagaacggcagacctgggcccagcaagagcaccagcttaaggaacactaccaggcgctgcaggaggagagccaggctcagttggaaagggagaaggagaagagccagagggaagcccaggccgcctgggagacccagcaccagttggcattggtgcagtctgaggtgcggcggctggaaggagagctggatacagctcggagagagagagatgccctgcagctggaaatgagcttggtgcaggcccggtatgaaagccagcggatccagctggagtcggagctggctgtg

SEQ ID NO: 1413 - DNA, 395 bp, Homo sapiens
cggcggcctacggttgcgagatgacgacagaaggggattaaattcctttgttcatactcataaatagcactaaagtgttataacattttcatttacctatttttagttccttcattttaacttaataaaaatcttggattgatattctttgtttttttttttttttttgggggaggggggttgtttttttaccccgggggggatgacgggggtttttttttggtttcttggaaacccccccccccgggttaacccctttttcctggtttaacctgccaagggggggggaacgggggccccccccccccccccggggaaattttttgggtttttaagaaagaaagggggtctcccccttggtcccagggggggtataatcttctgccccttggaac

SEQ ID NO: 1414 - DNA, 396 bp, Homo sapiens
tcgatctgaagtccgagctgaagcggcggaacttagacatcaccggagtcaagaccgtgctcatctcccgactcaagcaggctattgaagaggaaggaggcgatccagataatattgaattaactgtttcaactgatactccaaacaagaaaccaactaaaggcaaaggtaaaaaacatgaagcagatgagttgagtggagatgcttctgtggaagatgatgcttttatcaaggactgtgaattggagaatcaagaggcacatgagcaagatggaaatgatgaactaaaggactctgaagaatttggtgaaaatgaagaagaaaatgtgcattccaaggagttactctctgcagaagaaaacaagagagctcatgaattaatagaggcagaaggag

SEQ ID NO: 1415 - DNA, 393 bp, Homo sapiens
  misc_feature (1)...(393): n = A,T,C or G
cgttgctgtcggacgccggtgcagtctcgaaccatccctctgttcatgcgaaacaaagatgtcgctgcagaagcggccacaggtagcggcaaaacactcgcttttgtcatccccatcctggaaattcttctgagacgagaagagaagctaaaaaagagtcaggttggagccataatcatcacccccactcgagagctggccattcaaatagacgaggtcctgtcgcatttcacgaagcacttccccgagttcagccagattctttggatcggaggcaggaatcctggagaagatggtgagaggtttaagcatcaaggtgggaacatcattgtggccactccaggccgcttggaggacatgttccggaggaaggccgaaggcttggatctggcn

SEQ ID NO: 1416 - DNA, 369 bp, Homo sapiens
gaaataaatcagcgcttcaaagacaaacttccagtgcccattccaatcgaattcattatgaccgtgattgcagcaggtgtatcctacggctgtgactttaaaaacaggtttaaagtggctgtggttggggacatgaatcctggatttcagccccctattacacctgacgtggagactttccaaaacaccgtaggagattgcttcggcatcgcaatggttgcatttgcagtggccttttcagttgccagcgtctattccctcaaatacgattatccacttgatggcaatcaggagttaatagccttgggactgggtaacatagtctgtggagtattcagaggatttgctgggagtactgccctctccaag

SEQ ID NO: 1417 - DNA, 358 bp, Homo sapiens
ggatttcaccatggtggccaggctggtctccaactcctggcctccaatgatcctcctgcctcagcctcccaaagtgctgggattataggcatgagccaccgtgcccagctgctaactagaaatgtaaagtgcacagagtggtagtgctggtaataattctagagtataaaaacaatttaaaattttttggagaatttgtttttcagatttgaaaagaaaaggggaatgatacacatatctgcttaaaacaatgatacaggaaaggttttttttaaaacaggctaaaaattttgccttcctttctaattctaaagatgatggaaatgaagaccattatgtgggccagggcggtgggtca

SEQ ID NO: 1418 - DNA, 175 bp, Homo sapiens
cactgctttgtaagacttttcttattttttcatatgtacatttgacttttccagctaggctgtaagttccctaagggcagggtgcatattttccatatgttttggcacctatactaagcctgggtatatagtaagcaattaataatatttgttaaggctgggtgtggtggcttat

SEQ ID NO: 1419 - DNA, 172 bp, Homo sapiens
tgtgtcatgggaagaagttgaagggttttagttagggagagtcataataaaggttgcagtttaacaatgtcattcttgaggaataccaggtaaacttacagatcagacacttaatttatttctacttgctccgaaaactccactgacatgagcatagagagtcaaataaagg

SEQ ID NO: 1420 - DNA, 172 bp, Homo sapiens
ggaacctgaaatgagaaaagggtagtgaaggaagacttgatgtccttcataactggcctgcatcctgcccagcccctcctttctttccagaagcccaccagtggcccagagtggaagggtgggagtcagaccagtccaaggttgctaattaagactggactgccaggcacgg

SEQ ID NO: 1421 - DNA, 386 bp, Homo sapiens
cgttgctgtcgtggagtgacagtttccgcccacccctcagcagtgcctgggctcacctctccacccacctccccacacagccagaggcaggccctcagccgcaatcagtaacattcagtgaggacatgtgtttatcatgtgttgtgggtgggtgcagtgagttctctattcaggtaggagtggaagctggctcagggctcatccagtccaatgtcccacaggtatagaagtgccctgataaaatctcagagctggctgtccagtcaagatttgcatacctccagaaatggggctcttactacccctcacagtagcccattctactgttgggcacctccaatggtcagcattttctttccggcagcctctttcttgggctggggggg

SEQ ID NO: 1422 - DNA, 278 bp, Homo sapiens
gaaatatcagcctaaacgtagtttatgtttaggaagcaacaaccgtaaatagtcccacatccaaacggagtggatttaggtttcactttttcaaggaaaaaccatcaaagaatttttccacatacttataaaccatcccacgtatagaatccatttttactgacacaaatttagtaccaataaacgactcttcttctcaatttgttttatttaacaataagtcttgaacgtcattcccagttaacattttgaagagtttcctctctttcgttctgttt

SEQ ID NO: 1423 - DNA, 385 bp, Homo sapiens
cgttgctgtcgctggaaagtgggataatactttttacctcatggacttgtcaggaggattcattaaaacgactcgcataaagcctatgccacatggtagatgccaattcagggtctcaagaaagaacagcccacaggattgacactgaaccttaacaaagttaacaggaccaagctgcagagagggtgctaggacagcgaagccaaagaggacccctcaaacccaacaagagctgtgcggctccctgattcctcgccagtgttgctaccgcccttggctcttcttgcatggctggctcttgagacccctggaagctgatggaggcaacgtgagaagcacatggacatccgaccttgagcttgagaggcagaggcctgagttctaa

SEQ ID NO: 1424 - DNA, 363 bp, Homo sapiens
ggtttgaaaagtctgttctaatttcatttcgatgtgacttagagaaaaatactcccccgtgcctcatgcccacactctgggcagtgccacccgcagctcggcaattgccaccttccttgctgtggtttcccagccttgggccctgcccagacattggtctgaggctgcctggtgctcttccccaccaccctgggggcccaggtttctcttccccctgcagatccagaggcgtaaaactacatttggtaacctggtttgtcatgaaagtggacatttgactttttcttaaaaatgtttgggttatggctgggtgcggcggctcacgcctgtaatcccagcactttgggaggctgaggcaggcgg

SEQ ID NO: 1425 - DNA, 359 bp, Homo sapiens
tataaccatttctcctcacaattatactagagaacttagccaagctaatcacaaaataacaagaaattgtaggttataaaatggaataaggaaataaaactggcattacttgcagagaaaatgactacatgttttgagaaccccaaaatctgcagataaactgttagaattgacaaggctatttagcttcctatgaagttgatatacaaatatcaattgtttgttaacataagagcaataaagaaacaaagtgaaaattattaaaaggcaccattcacaacattatacacaaaatcaaataattgtaacaatgtaagaaatcaacagacacatacacaaaaaataattattaagataag

SEQ ID NO: 1426 - DNA, 332 bp, Homo sapiens
tccatagcgcccatggctccaccaccagtcaaaggtagtggggccagcagtggactcctgtgtggttcagctctcaaaaatgtgaactgaaagacacagaaaaagacttgtgtttggggataaatactgagactgagcagtcttgtggattcaggaattgggcatccagttgggaccctttgcaagaagggtgttagggagcacagagcatgagtaagccggaagcagagcaggagagagaatggagcatgtgtgcaaagagggcggtgagatgctgagagtaatggggctggcccaagatgaagtgagaggaagcaaagtgagacagaggg

SEQ ID NO: 1427 - DNA, 330 bp, Homo sapiens
  misc_feature (1)...(330): n = A,T,C or G
caaagcttactactcttagtgaatttgagctttcctcccttctcaacgcttatggtttgtataagtaccatgaagagtcatgggaattttgttccttttatttatgagatatatattcaatatatattcatcttgcacatgtatatacatcctacttgcagatttaaccttgacttgaaatttgaaatatttaggaagaagaaaggaaacgtcaagaggaaatagaacgccagcgtcgagaaagaagatatattttgcctgatgaaccggccatcattggacattcaaattggggctgcaaaaaagggcccggtatgaactgaaacatcn

SEQ ID NO: 1428 - DNA, 386 bp, Homo sapiens
cgttgctgtcgaccggagtcaagaccgtgctcatctcccgactcaagcaggctattgaagaggaaggaggcgatccagataatattgaattaactgtttcaactgatactccaaacaagaaaccaactaaaggcaaaggtaaaaaacatgaagcagatgagttgagtggagatgcttctgtggaagatgatgcttttatcaaggactgtgaattggagaatcaagaggcacatgagcaagatggaaatgatgaactaaaggactctgaagaatttggtgaaaatgaagaagaaaatgtgcattccaaggagttactctctgcagaagaaaacaagagagctcatgaattaatagaggcagaaggaatagaagatatagaaaaagag

SEQ ID NO: 1429 - DNA, 387 bp, Homo sapiens
cgttgctgtcggagatcctgtgtacaacagcaattggagctctaaaattaaacatcggggacctacaggttacaaaggaaacaattgaagatgttgaagaaatgctcaacaaccttcctggtgtgacatcggttcacagtcgtttctatgatctctccagtaaatactatcaaacaatcggaaaccacgcgtcctactacaaagatgctctgcggtttttgggctgtgttgacatcaaggatctaccagtgtctgagcagcaggagagagccttcacgctggggctagcaggacttctcggcgagggagtttttaactttggagaactcctcatgcaccctgtgctggagtccctgaggaatactgaccggcagtggctgattgact

SEQ ID NO: 1430 - DNA, 352 bp, Homo sapiens
gttgagaagctgggaatggtggtggaacctaaaagacttccaactctgaggaaattgtggtagaaatggaagcagtataacctatgattgaacttaaccgatgtaggtgattgagattgtatttgcagagacaatgcttaaagaaataaaagaaacccagacataaaaactgaagctttaatggagatacataaatacataggaccttggaaaacaaatgaagtaatataactgcatataatttgtttacatatataaaacataggaaaatggaaatacagtgtattcttaagtgtacatttgtgtgtgcgaaatttattgagtgcttttactttacataaaccgcggaaag

SEQ ID NO: 1431 - DNA, 350 bp, Homo sapiens
aagtcggcagagcaaggacttgaagtaagctggaggtaagctggagtgtgaagtgtgaaatgaactgtatgtgccccttgcaagggtgagcagccacagtgccagctgatgttaccttgtcagaatgtagcttcagtattgctatggctttgtttttctttcaacttgcaaatgctgataactaatacaaaattttaaactgttgtctgcaaacatagtcttggtccaaaagctccttcagctgataagcaacttcagcaaagtctcaggatataaaatcaatgtgcaaaaataagtagcattcctacacaccaacaacagtcaagttgagagccaaatcaggaatgcaa

SEQ ID NO: 1432 - DNA, 351 bp, Homo sapiens
ttaatgttcaaacaacccatagagtggctatcattactcagattttatcttagagaaatcaaagctctaataattcaggctacttttgaaaatttattcatcttcttatgactagaaacaaatatttcaagcccaaaagataaagatttaaagtaaaagaagtcttaaagaagaggcagcacaatacagtgctgtagtaaccttttgtgagcatcagactcaccagtggagctttctgaaaatcacatgcccagctctcacaacttggggagactgtgattcattagatctggagtgatgtcctgcgtatactgatgtagtgaaaagaatatgagctttgcattcccagtt

SEQ ID NO: 1433 - DNA, 351 bp, Homo sapiens
atgtggaaattacaaatgcatcaaagtattctaactagtgtttagaaatctaaaaatgaaaatattttgcaattatgaagcaaagatgactgacttcaacaaaattgcatgctttcaaagttcacaaaagtatcaagttttgactatgcaaatgcaagaagcactaagagtaacgataagctagcacctatcagagaggtatttcaaactatttacagctaacaccagtctaatctttaaaaaaattaaatataggtcagtcatggtgactcacacctgtaatcccagcacttcatgagcccaaggcaggaggatcacttgagcccatgagttcaagaccagcctgggcaa

SEQ ID NO: 1434 - DNA, 378 bp, Homo sapiens
cgttgctgtcgggaactgcgggtgtgtgtgtgtatgtgtgtgtgtatgtgtgtgcgcgcgtgcgtgcgtgtgtgtgcgcgcgctagtgtgtggacaaggaggtgggggcagctgagttagagtcccaactcttggactccatttgctattctcttctttctcccccacacctatctggtggtggtagtgggcgtttatatttgcgttccttttcattcatttctaaatctcttaaaaattttgggttgggggtattggggaaggcaggaaagggaaaaggagagtagtagctgaagagcaagaggaggacatggagatgaagaagaagattaacctggagttaaggaacagatcccccggggaggtgacagaggtagt

SEQ ID NO: 1435 - DNA, 357 bp, Homo sapiens
  misc_feature (1)...(357): n = A,T,C or G
cgggtaatatttttagtagatacagggttttgccatgctgcctaagctggtctcaaactcctggactcaagcaatccacctgccccagcctcccaaagtgctggggatacaggcatgagccactgagcccggccttaagacatttttcttacgagggattttttagccctgagggaaatttatcatgaaagcaatagagttcagagcaagaactctggaatcagagctcagatttgattctggataaaacctgaagagttatataaccttggagaagctaactgccattttgaaccatagtttcctcacgtgtgaaatgggtttcatgttaatatatataactcatggattataggn

SEQ ID NO: 1436 - DNA, 351 bp, Homo sapiens
tattcaatttcctctgttaatggttcctcaagcataatctgagacctcccccccacccgccaacagggcctggagatcataactatttttattataatgtttatgcatttttgtctttttcattgtgctgacatttgtgaagaggaaaacggctggttccttaccacgagtcaaaggcatagcagaaaattgttttactagtcatggtattttttttttttttttactactatccactcacaaaaaaaaaaaattttagttccactgaaaaatacttttggggaacacccaaaaatttttatttttattaaatcttgcccctggggcactttaaaaaaataaattttttgg

SEQ ID NO: 1437 - DNA, 352 bp, Homo sapiens
gaataaatgtgttgaaatttgtctttattcacgagatcattagaggctaagtcatggcaacacgtgtagttcaattcaattttttttgtgtaaaattttgttgagctgcatccatccgcatatgtaacactaatttggtaacagcttctttatactaagccagaattaatttgtcctcatggttttgttttaaatgtgtgagctgtattatatcacatttgaacaagtaatatagagaatataaatttagtttagagaaagaaaagtacaggcacactaaaaatgaattaggatctggcagctgacactgattaacaggttgagcaaattcaactagacctaaatctctgtg

SEQ ID NO: 1438 - DNA, 353 bp, Homo sapiens
acccagtatgtaaataccacttcccactacaataaaagagggctcttctgagacaagtttaattccagatctagggaagacaatgtataaggtgaggcagtaaaatcatgtcttactagagaaaaacgattaagtgaaaaggacaaaaaccactgggattaagtgaaaaggacaaatacgaaggaagatgctcctactggcccaaaatggatcttttaatcatcaataagaactgattaaagttgattatagattaaaaaataaaatccactggtaaccatggaaagataagggtgaagtttcatttatttgtacaaggaataaatggatggcagaattagaatatcactggt

SEQ ID NO: 1439 - DNA, 350 bp, Homo sapiens
ataatcaaatagcccagaactggggccaagccaattctcgtcattgacaacatattcgggattgtccatgggttttcatactgaaacacaaagacaacaaaatttaagtaaaatactatgaattcatactttgaataactatatacatacattagaaaaatatacttcatcaacttcagtcagaagctacataaactttaaatttagcacattaaattgaattttaaaatccattctgttctttttacagatatctccctaaaatcttctttcaagaatacagaagatggctgggcatgatggctcacgcctataatccctgcactttcagaggctgaggcgggatgaac

SEQ ID NO: 1440 - DNA, 350 bp, Homo sapiens
  misc_feature (1)...(350): n = A,T,C or G
gacagggctgaagaacacaggtcgctgcatttagaaaggaggcggggtcagaggaatanaaagggacagggctgaagaacacaggtcgctgcatttagaacggaggcggggtcaaaggaatagaaagggacaggactgaagaacagaggtcgctgcatttagaaaggaggcggggtcagaggaatagaatgggtcagggctgaagaacacaggtcgctgcatttagaaaggaggcggagtcacaggaatataaagggacagggctgaaaaacacaggtcgctgcatttaaaaaggacgcggggacagaggaatagaaagggacagggctgaagaacacaggtcgctgcat

SEQ ID NO: 1441 - DNA, 380 bp, Homo sapiens
cgttgctgtcgacctgttttttctttttttctcaacagcttatttcattttttttttttaattaaaagtttacttttacatgttttgaatgttggaatattggcttatatggggactttttggttttattaaggtttgccaaattaataacaattttcttatttttaaagggtctatccatgttagttcagctatcactgaagaccaaaagaaaagtgaaaaagggcgaccgaacattgcaaaaattgaagacatcaaagttttacaagaaaataatgaaggactgagagcatttttactcactattgagaatgaacttaaaaatgaaaaggaagaaaaagccgaattaaataaacagattgttcattttcagcaggaac

SEQ ID NO: 1442 - DNA, 355 bp, Homo sapiens
gtgccccacgaacgaaagtgtcttcccatcagtccctgcactgggaccggggatcctggtgtcccttgttcgagctcagggtgtgcctcagccgctaagtgaaccccaaggggggctttgggcgcacaaagcccatgaggggaaggtgagttttgaggggagaggtgaggcacctgtcacagaaaaagaaagaaaaaacccgcgccgtggagaggtggggcctgggtcccccacggatgaaagtgccttcccatcagcccctgtgctgggtaccggggaacctggggttcctggtttgagctcatggagagccttgggccactaagggtaccccaacgcggtggaaagcccatgg

SEQ ID NO: 1443 - DNA, 381 bp, Homo sapiens
ggcacgaggggaagtgtgatgacgtcttgcggctcctcatggccgagctgggcttggagatccccgcctatagcaggtggcaggatcccattttctcactggcgactcccctgcgtgctggtgaagaaggcagccacagtcggaagtcgctgtgcagaagcagagaggaggccccgcctggggaccggggtgcaccgcttagctcggcccccatcctagggggctggtttggcaggggctgcacaaaacgcacaaaaaggaagaaagtgacgtaatcacgtgctcgatgaagaacagttggcactttgcagatggccagtgtcacggtgaaggctgggttgcccccacgggtctagggagaacgaactctttggggatgac

SEQ ID NO: 1444 - DNA, 347 bp, Homo sapiens
  misc_feature (1)...(347): n = A,T,C or G
atagtctgtcacttaccattgtttctgcaagccaagggcattttttatgattttacagttacctaatttatagtttataatataggaaagttcatttattctctaactatatgagccttaaatatcttggagatttttcctatgatttgccccagaaattaaaagcaattcagggggaatgaagaatgaaatagagaaataaaggaagtctgaaaattcagaaaataaaagtatagtttgggcaaagcaactctaacaatattatcatgagctatctatctttttcaataacaataataactcatggtaaagctctatttttttctcataaggctactttgaaatgn

SEQ ID NO: 1445 - DNA, 343 bp, Homo sapiens
  misc_feature (1)...(343): n = A,T,C or G
gaaccaatcttgaatagggaagtgatgctacaaaaatgctaaaaaatgaattaatataatgcaaatgtcagtttagtaaatataaataatgatgcttatctatatggaaagaaggcaaaatataaataggtagtctattcatagatattacattgatccaggtattaagaacatgaaatcattaggctctattaaaagaaaaattcattgtaattcatacttattttctaatcacttgtaatagaatttttaatagtctatttttcagaacaattttaggctcacagcaaatacaatagaattttagttatacaattcatacatgaatactatttccttgatn

SEQ ID NO: 1446 - DNA, 342 bp, Homo sapiens
  misc_feature (1)...(342): n = A,T,C or G
tgatgaattatgaaggaaggacatttattttgagaatcatgagcattataatatttattgaggattagaattttgttatgtggaggtgctactacctcctcatgagccacttctgcactcaatctcagtaagaagaaaatgattaatttgtaaaatattaaattatcatgattttttcacttttctgtcggttttttctgttaatgtcaggtagcttatctttagtctttatgattaaaaatgggagaaagatatcatattaaaaatgcagaggctgggcacggtggctcacacgtgtaatcccagctttgggaggccgaggtgggcagatcacctgaggtn

SEQ ID NO: 1447 - DNA, 350 bp, Homo sapiens
caagcatgagacacacatctggcagcttaacatttaaattacgagggggaaaccctcacttcagtagtaattttctcaaagaaaagaatagggaatggattacaactaaatttaatttctttttaaattttcatcttgtctaattgcaggcatttttctgggttctttgtattcatatattttcacacatattttctgtagattttattcatctttaatttgagatgcttctcactattagagctcttgaaaaattgtggtatattttacatagaaaattatctcgagacatctatctgatctcaagtaatatagacatggcatagaaaatacaaggaacatggttttct

SEQ ID NO: 1448 - DNA, 345 bp, Homo sapiens
ccatcaagcattttgagcaaagccaaaaatattatgaagaaaataaaagaatgaataactatcagaataagaatgtgtggagatctgactaaataatatctctgttttattatagaaggaaatgtaaatttatgtggaagagtgctttaaactgtaggaataggacttccaagaaggtatattttggcacagttgccaagttcatgacaatcaagtaggtcgccttggaataaatgaaggaaagaaagctctctgccaatctgcaatcgcaccccttactcctactgaactggcacatatactcacagatattgctagattttagggtactgagggacattgatt

SEQ ID NO: 1449 - DNA, 347 bp, Homo sapiens
agattgaaaactaacatatcaaatataaaccacataaccataaatgttttattttacgttcaactactgttttctgtttggtgaggaaacaaaagtcagggcaagagggtgccaataaggagaaagcagaagggacaagaaattggaggcttctgtaacaaagaacaactagaatgtgaatagagaaatgaataaataccgaagaaagatcgacttggctctttgaagaggcccctggattaaggccgtggaagagatcgagtactggaagattgtcgtcacaacggagaattgattgtcataaaagacgacgctagttgctgcaagtcatacatgtcactggctgg

SEQ ID NO: 1450 - DNA, 371 bp, Homo sapiens
tacggttgcgagatgacaacagacgggcaagcataagtacgctgaaggggcatctgacaaggctattgatgtcctcatagaaaggaataagcatactgggacacacttttagcccttatgacttgctgcctggaatgtgtccatgacgcctggagatgcaggagcgtgaagatgcacagcaagcagggagagaagctgggtctttgaccactatcttgagcagctgtgccagccccaggctgcatccacttcttgttattgggaaggacaaagccctatttacagacaagtctctattccatgcagcttaatgcaatcctgactcataaagtacctccaaaccaccgctccccagttgttccatgtcaggt

SEQ ID NO: 1451 - DNA, 317 bp, Homo sapiens
tagttaaatataaatgggtaattaactttccaaaaagaataaaacagtcaatctctctgcacacacacacaagatgcttttcttaattttttctgtgaatgacttgacttgatatttaggttttaattttcttgaacaacttaggtgttgcaaaaataaaaactgttgtaataaaagttttatggcttggagagtcctacttttcacagcaaagctgagggagaacggaaaacacatagctttgatgggattcttcataaaatagcttgttttttgtgctgctgaaaatagtattgatggcttggagatgtcacaaa

SEQ ID NO: 1452 - DNA, 315 bp, Homo sapiens
gtgtatcacatatctagacttcttgatggaatattgaatttgaatacttatactataccaacatctcactaaattaactaatgaatactgaattttagaatgcgttacttgatttactgtattatcagtaagtagccctaatttatgtacagaaatttaaatgtatgaattttaatcacatttatatcactttatgaacacttaaaagtacattcatgacccaccagtgggccacaaatgctactttgatctacattgagtttgttacatacatatccttgaaccctataatggattccatttagtcttaccggg

SEQ ID NO: 1453 - DNA, 293 bp, Homo sapiens
aaaaaaagcttaatagtcataatatatatgggatttttacaaaagaaaaacaccaaaatagaaacatgtataaaggaaattaaaaggaaatcaccaaagacaaaataagaaacccctcaaaaaacagcaaattaaaatgagacatttttgggttgggcgtggtggctcacgcctgaaatcccagcactttggcaggccgaagtggctagatcccttgaggccaggtgtttgggacgagcctggccaatatggcgaaacccctctttactaaaaatacaaatattagccagtgg

SEQ ID NO: 1454 - DNA, 343 bp, Homo sapiens
atatataaactacaatcagagcactgttctgtaattacaggcttttacatctctctctctcctctagaacaattctctctttcaggataggaactgtaacttattagcagttacatcatcagagctagcagagtctggtgaattgtaggcattaaatatgttttggttgaataaatgaatgaaatatacattccattcctaccccaaaccagtataattttcttacacctctattactcaacttcctcacaaggtctgccagtcaagagtcttagcagccacaacagctccttcaagttaggatcatttgaggagagtaaagtgatgacttaaaaaggtatgg

SEQ ID NO: 1455 - DNA, 375 bp, Homo sapiens
cgttgctgtcggaaatggtaaatgatgtacaagaattgccagaagagtcaaaactgcattattaataattgtgaaaaattacaagcaaaacagctcaaattcatggaagattaataaataggaggtgggatagttatgtaataaattattataccgaaacttaaatagatgaattagagcctcatgagtcaaccaggataaattttttaaaagttcagagtaataaataaggcgcaggcttacatttataatataatatctgaaaacttaaatactaaatacttatccaacataggtaataatagttcaaacatgcatggaatggaaaaacaaattcagggtagtggtaatctctgggaaggaatgagtgaattt

SEQ ID NO: 1456 - DNA, 343 bp, Homo sapiens
agggtggagcctgccctcctccacctgacacccccaaccaggcctggggctcggtgtctccagctccaagtcttcccctctccaacagccacttaaaggcctccctctggctcttctcagagaagaaaatcaaaagaaggagagagggaggaaaggcagtagttcagggcatggattcaaatctgcatgtaggagatggaaaagcaaggtaggagatgggcagagacacaggaagagcaggagatgtagggtgtggccttagcacttgctgggaggtaggggtgggacaactgagtgaggagctggcttagagagcagactgtggagtttagtcctgatggtg

SEQ ID NO: 1457 - DNA, 363 bp, Homo sapiens
tctacacttggattaagacaagacaagagacttcgatgtgacatgacgcaccacattaggatagcggagtaaaggatgcttgatatgagacagtggctatgctatagtgttattctaatccaataggagctgaagcagacccttttgaaacatcctgtgcgatagttttatgattgacggacatgaggcgcagtgggaagtttttttctttcctaaaaacagattgagagagtctcaatctcaagggccagttaagaaactcatgggtgagcctgtaatcccagcactttgggaggctgaggcaggcagatcacttgaggtcaggaaatcaagaccagcctggccaacatggtgaaaccttgt

SEQ ID NO: 1458 - DNA, 335 bp, Homo sapiens
aggctttcagaaataaccaagaacatcaaaaataaagaggacttttacaagtgaaaaatgcagtaatcaaaaatgaactcaaaagagagattaaatagattagacacaactgaagagaaacttagtaagtgagaagctctatcagaagaaattatgcctaatacatggagacaaagaaatggaaaatattcaagaggagttaggaaacgtgtaggaaagaatgaacagctttaatgtatgttgaattgatatgcaagaaataggaaatgcaggcccggtgcaatggctcatgcctgtaattctagcactttgggaagctgaggtgggtggatcac

SEQ ID NO: 1459 - DNA, 340 bp, Homo sapiens
cattcatcaatgagtagaagtaaatacattatagttgattttgctaaatcttaatttaaaagcctcattttcctagaaatctaattattcagttattcatgacaatatttttttaaaagtaagaaattctgagttgtcttcttggagctgtaggtcttgaagcagcaacgtctttcaggggttggagacagaaacccattctccaatctcagtagttttttcgaaaggctgtgatcatttattgatcgtgatatgacttgttactagggtactgacaaaatgtctaaggcctttacagaaacatttttagtaatgaggatgagaactttttcaaatagca

SEQ ID NO: 1460 - DNA, 258 bp, Homo sapiens
cacaaattgctctttgcttaaagatcttcttttgttttgtttaacttttctagtgcattgtatatcttgtctaaattaaatccaattacgttaacaacatttaataaacattttcctcctgtgttcaaaagtgattttgtttatacttcatcagggcgttcagtggttgggcagatcaagaatactatatttaggccaggcacggtggcctgtaatcccagcactttggggggccaaggcaggcgaatcacttgaagc

SEQ ID NO: 1461 - DNA, 337 bp, Homo sapiens
atttaaagaaatgaagatatgtccctatttctgtactgtataatttcaattgtttttcgcttgctctaaagttcttatcatcaataattatgtaacactattatatactcactatgacacttttaagaatggaaaaactattcttaggcatattttatttttaaaaacttcttaactatataatagaagagcagagatttttgcttcttttttaaacatttactggctgaatatttttcaatgacacttactatttgtataagtttcaaaccagatttgattccaggccaccagaatgaaatcattacctgagtcaacaggattacctataggcccg

SEQ ID NO: 1462 - DNA, 340 bp, Homo sapiens
cgggggcagcaacaagggccaacagccctggtgctggtcagagatccacaaaactgtcaccttcactaactggtatgtggtgatgttggaacctcaaagcactcaatgtctccttttcttccagaaagggccaaaatgacctcctaatgacagatttcctatcaagggcatattcctggtccctaatataaaaaatcaagagttatttcaattattcaccccccaccttccctgaatattccagatgtcactaaggaaagtctaagatgtggaacttttgctgcaacttactggaaacattcgtccgttactcacttaaattattcaagcaaattagggg

SEQ ID NO: 1463 - DNA, 339 bp, Homo sapiens
aacactaatatttatatgtaataagtctaaaaaatagacaccaacagccagaaactgagtagaacatcaaatctaatgaaagacaaagacttcaaggtataagaacagattaagtgcaggctgaatccaaaatggactatataaactaggaagcaaggtataagatactattcttagattcacaggaactgaaataaaacatctaactctcaacttataattcatatagcactaaactaggttctaatgtttttattcctataaaaaagtgtgttcaaacaaaactcattattgttgatgggaacaacaactgtgccttacagctcaaacttatgtaag

SEQ ID NO: 1464 - DNA, 339 bp, Homo sapiens
  misc_feature (1)...(339): n = A,T,C or G
cctcctttgttactagtttggagcagatccttgcagacgttttcctctgcattcacatgcatgcaaatgtacttctgaatgcgcacgtatgtctttatatacagatagcttttaacaaatagcaggtggggccggcactgtggctcacacctgtaattccaggactttgggaggctgaggcggggggatcacttgaggccagaagttggagaccagcctggccaacatggtgaaacaccatctctactaaaaatacaaaaattanctgggcgtggtggcgggtgtctgtagtcccagctactcaagaggctgatgcaggaaaatcgcttgaacccaagg

SEQ ID NO: 1465 - DNA, 337 bp, Homo sapiens
ctgacttctctaccctgctcatattttcccccaacccatccctcttcccaccttttagtttttgaatccgactaaaggaactgaattccaagagtccaataaattaaagaaaaaaaagtcatacaatccctacatccaggaaataccaatgtaatattatgggcttttttttggtatgcgtttaagaaaatactatttacataaaaagttaaatatccaatgttttgcttttaacttaatgtcattaaattaaataaacactaagtttacacatttatttaaaagtaccaaggtacttttaatgaatataagataatttacttgactactgctttaa

SEQ ID NO: 1466 - DNA, 338 bp, Homo sapiens
aaatcctatatttctggtttcggacattttggctattaaacaggaatactccaaactatctctttcaaaccaattatttttcaattttataaatcttccaaataagcaaaagcaaccacaaccataagaacaaagaatatggctacatttatatagtatgttctttttcaaataatttgtaaaggcaaatttgaaagctctagttgtttacacgttatcagtgatgagataaaaatgttagcataaaaatttggaaagcattaaatataataggaattagagattgattatgtcaatctgatcagtaaatcatgctgatttactgaaaacaaattaca

SEQ ID NO: 1467 - DNA, 337 bp, Homo sapiens
tgaccttttgatcccaccatgggactgttccccagccctaagcccctgaaatggggggaaagagaaccctcctttccttgtgcccactctatgatcttttgaacatgggttacctcccttcgcggcttttggaacataaggcaagcacaagctcttgagtctctagtttctgctgtcatctactcttcctgcctctggcacctcccagctcctgacttcctcctgcttacccctggagccagagacgtggctgggaagagcccctggcctttgaagccagaggtggtggtgaccaggggcaacaggccactgtgctcctggatgcgtggtctgccag

SEQ ID NO: 1468 - DNA, 338 bp, Homo sapiens
tataacagaacacattttgaagcacaaagtgacaggaagttcggcaggtttctcaggcctcatttttgaggtatcctcttggttttggggcctcatctggcattgcttgctcaggccaggcccagcaagcggggtgtagggcagggcacacactggctacgggggtctctgcagcaggacagagggggctccctacttttatttttcctggggggctccttgactgctttggcaagctgatactcggcgttatctggtgtgttttataattttttttaggatgtgtgtgttcttcccttggagggggtgccgtctttaatttttctgcgggggggttt

SEQ ID NO: 1469 - DNA, 329 bp, Homo sapiens
gaagaatgaggatcaaaaggtaaaatactttataaattaatttttcttttccttatcctccgtgactgctataaagactgtgaaaggtgaaggctaatggagtagaacttccttacatccacaatgtatgggatctactgtagtctacacagttgacagtgtaacataagccttactagatcagttcattattataattctatggccaccatctgtccctactcatagtaagtttacagagacgataaaagatctaatttcagttctaccgatcccattggctttataaacccttaactgaagcttagcaaaaggattagtagaaaacg

SEQ ID NO: 1470 - DNA, 332 bp, Homo sapiens
ggcagccttcatgacccacatgtgaatgtgtcttatatcaaatattatgtttaatttaattatgtgcaattgaggtagaataaaagaagaaaaaaaagactaggacaagtggaaaagaaagagtagcacagtacatttacagcagttggaaattatacattttgcataagaggtaatcaggatatagactaagcagcacttacaaagatattccaaacaaaactaatgtgcaaacaaaatagaaggtatctctaccactttctctcattcatttaatagtttagttatcatccaataaaaatttaagacacggccgggcgcggtggctcatg

SEQ ID NO: 1471 - DNA, 302 bp, Homo sapiens
acccacctcagcctcccagcgtgctgggattccaggtgtgagccactgcacccagccaggtgtgatttttaggcggaatcttaacacagtattgaaagatttcttcaaaccagaagaaaagcaggtatctgaaacattttagtgctggccacagagttggagatgaacagggaagctgaggatcggcccgacggctggcagcaaatgagaggagacccgagcgccaaacattgacatgacttctgttggtcatgcggcctcttggaaaatgtttttccatgaactgttgtttagaaatgtct

SEQ ID NO: 1472 - DNA, 331 bp, Homo sapiens
gagccaccgtgcctggcctcaccattgttaaaattatggaaatcgtgtttgcaaagcaggttggcctgtttggaaaagggtgtcataatttctcaggtaactccaaaaagagaaagctacgaaaattaccttaatacattcattacagtctcagtataagattatagcttcctctcccaaagcgtaaccacaacctgacgcaggatgagttggtttgaaaataccgcatacaatatcctcttgagtagaatcataatttagaactctaaaaatgaccggaaacaaaactgtccaagtttgtttaacgtaatgtgtttcaacttatttgact

SEQ ID NO: 1473 - DNA, 329 bp, Homo sapiens
ggaccttttgatcccatcatgggactgctgcccagccctataccactgaaatggggggaaatagaagccttctttccttgttgccactcttgtatcttttgaacatgggttacctgccttcgcgtcttttggaacaaaagggaatcataagctcttgagtctctgttttctgctgtcatctactcttcctgcctctggcacctcccagctcctgactttctcctgcttccccctggagccagagacgtggctgggaagagcccctggcctttgaagccagtggcggtggtgaccaggggcaacaggccactgtgctcctggatgcgtgg

SEQ ID NO: 1474 - DNA, 323 bp, Homo sapiens
gggggggcggtaaacgacagaagggaactgttgtatttttaatagacaatttcacgacgttggcgaggctggtcttgaacccctgacctcaggtgatccacccgcctcagcctctcaaagcgctgggacaggcgtgagacaccgtgctgggacagtagtaacttctaatggataatgtatgcgtggggtggaaaggggagtaccagtatttttatttctaacacatatacaaaacaccagcttgctgttcaccctgaagaaccctgggcacagagcttattcatattatcgtgccatcgtgccctatgcattcttcaatgggc

SEQ ID NO: 1475 - DNA, 328 bp, Homo sapiens
atccattgttaaagaaataaatcagcgcttcaaagacaaacttccagtgcccattccaatcgaattcattatgaccgtgattgcagcaggtgtatcctacggctgtgactttaaaaacaggtttaaagtggctgtggttggggacatgaatcctggatttcagccccctattacacctgacgtggagactttccaaaacaccgtaggagattgcttcggcatcgcaatggttgcatttgcagtggccttttcagttgccagcgtctattccctcaaatacgattatccacttgatggcaatcaggagttaatagccttgggactgggt

SEQ ID NO: 1476 - DNA, 323 bp, Homo sapiens
gagagaggacagagaggcgggtcacagcttgacctgggttggtcctttccagctttgggtcatagagaggaatttggcttttcctttaagtgcaatgggaaattgttgtaagattttgagcagggctgcaccattatttgacttatgtgttaacagcgtgagagttaagaatttgctgctaggccaggcgcagtggctcacgcctataatcccaacattttgggaggccgaggtggtacacttgaggtcaggagttcgagaccagtctggccaacatggcaaaaccctgtctctactgaaaaatacaaagattaggttgggca

SEQ ID NO: 1477 - DNA, 135 bp, Homo sapiens
ggaacctgaaatgagaaaagggtagtgaaggaagacttgatgtccttcataactggcctgcatcctgcccagcccctcctttctttccagaagcccaccagtggcccagagtggaagggtgggagtcagaccagt

SEQ ID NO: 1478 - DNA, 318 bp, Homo sapiens
ttgcctacaattctaccacgtattttctataagcatgcaaatctagtataggtagaggatattacaggctaattaatctcttggcatctggtctacccaggcccagtgctttgttcttgaacaaacaaataaaaaaaaaacacagagaaataaccatgcaaatatgagaaatgttgcagaaatttgaaattgagacagcttcctcttttctataggatttttttttaggggaaaacaatctctatattcagtcttatatattacctgccttcaaaaaatcaaaacattgaaagttaagcaaaattcctgtcagaaagg

SEQ ID NO: 1479 - DNA, 292 bp, Homo sapiens
aaatggacgaaggaggaaaaagaaaggagaagagtttgaagacagaagaaattaaggaaagtaaactaaagcaattgaaactatttggcaatcctttccctctcaactctaaggcttattctaaattaggggttttctagatatacaatcatgtcatctgcaaacagggacaatttgacttcctcttttcctaattgaacaccctaaattaggaaagttaaacacctaaaatgtcaacactttcatttaaagaatgtgggagagccgggtgcaagtggcccacacctataat

SEQ ID NO: 1480 - DNA, 324 bp, Homo sapiens
gggaggggcgggagggaggataggagagcaccacacatagtcaggggaggctttcaaaagagtcttgactctaagaatacccaaaaagaaaggtaatgcaaatttcaaacataccacatgcattttcttttccttcccaaatcccactaaggctattttttttaaatccaggttctagtcctggttttgtcatgaccttaatttacccttcacctaatcacctttgactcagtttcttcatctataaactgaggggcttggcctcactgagttctaatgtcctttatacatttaatcttctatgagtctaagatgcaatttctc

SEQ ID NO: 1481 - DNA, 325 bp, Homo sapiens
tcacagtcaccacagcttcgttgcacatcttatttcttttgataatccttcaggtttttttttaaagacaatattgtacctttattttaattattatacatttcttacattgtcttatgattctgatggttcttcagtgatccactgaaaacacctttataatcactgaataggatattaaagaagtgtttttcttgactttatcacattgcttttggatctttgaaactggagagaaaagtcgggcacagtggctcatgcctgtaatcccaacactttgagaggccaacaagtttgagtccaggagttcaagacaccctgggca

SEQ ID NO: 1482 - DNA, 322 bp, Homo sapiens
aaggtggctttactaatcgatattcttatactgacaagtgctcaaacatggcgtggcaaagccttcattaagcactgattagcagttaatctgtctttcaggcagctaactttgctgagtaaatgtaccaatgacccctaaaaatgctacaataattttatttaaataattgcaagtcttaggaacacctctaaatcataaaaagaaaatgaaaaaatagaatgggtgacactaacaatgtgtattttttgttcattgctaaaaaaaaaatgaaggtacggtgtcaagtttcatgggtgactttttcttcttagtcggaaat

SEQ ID NO: 1483 - DNA, 319 bp, Homo sapiens
ggctagagtacagtggcatgatctcggctcactgcaacctccacctcctgggttcaagcagttctctgcctcagcctcccaagtagctgagattacaggcttcggccaccactcccggctaattttttttgcatttttagtagagatgggggtcctcccccgtgcctcccctaccactcatttcgatcccctcaaattcatcttctccctgcttctgtggctacattatcctgacctgacggaatatcgttctgcatggctcgcttcccgatattttccccttgcacatcaccggttactcatgttattgcccctcgag

SEQ ID NO: 1484 - DNA, 322 bp, Homo sapiens
tcagctaattcactcttttcttctttctggtaaggaaattgaggcttcagggtgattttgtgactttccagacatctgtagtggaagaactaggtctaggcccaaatcatttaattactagctgagcgacctgcacacaactgcaagaaattgttccatcacaaaacttcaggatgattggggttctctctttttctctcttttattccaagcttaaaaaaaaaaatctgctgaacgtcccactggagctgaaattgtagaagacaactagctctttaattatgatgtgcagggagctgcttttacttttcacttggctctg

SEQ ID NO: 1485 - DNA, 321 bp, Homo sapiens
accctactacttgagaaattagctgctcaatattgacatggacactgagaagaaaaatacattttggcataaaattaggaagaataaaattttattatgggaggcttcatattcaaaaacaactaaagcattttaaaatataccatttacaataacaaaaagagagttaactgctcggatcccattgaagttcatgaagttgatatactgtagcaatcaaaattctcaagattaatatttcatgacagaatacctggatttagggccaggcgaggtggctcacgcctgtaatcccagcactttgggaagccaaggccggcc

SEQ ID NO: 1486 - DNA, 321 bp, Homo sapiens
taaatgtctactaccatgtttaacattatatttgaccagtattcattgaacagcaacagaaaaaaaatatagaatatataagcaatgttctcaaaaatctattagcagtaaaataaaatatttttcttatagtgaaaaagtaatcaccatgataaagcaaattccaatataagtacagaaatatcatacaaaatattttacagtttttagttccattcctgttatgtatgttagtaaacaaaaattagaatattttaaagcctatgtatgacagttaactatcagaattattcttgtacattgagaacactagacagtagg

SEQ ID NO: 1487 - DNA, 322 bp, Homo sapiens
  misc_feature (1)...(322): n = A,T,C or G
gaggaaactactgtgtatatgtttttaaaacattttgaaatggtccatatacttacatataatttctgaattctgaaagaccaagatgattcttcaatagccacaggtcttggaccctgtttctcttaataactgtaactatagaacttgctcagtgccttactcttaggagaggcttcagaaatatttattgcatgcaattactgaatatatggcacatgtaacatctgttgtatcaacagataaacaggattctgagctgtttttttctccattgggcttcaggtacatagaaatggattgacggccgggcgtggtggcn

SEQ ID NO: 1488 - DNA, 334 bp, Homo sapiens
agaaggggggcaccctgccatgccactgctgcctgtgtatgtgcatcccacccttctccccgctgctgaaccaccactgtagttagaacattgtcggggacagagcccaccagccccgctcctgccagggcccactcctgtgctgaaattatcaccagcatgaaactagacatgaagaaaagcagacctagcccttccctgagtggccactcctgcccatgggaacacacacagagtgtgcacacagtcctgcaccaaccagtgccccacccctgcactaacatcactgctggttcacacacccacagttatggggaggggcgttttcccaagc

SEQ ID NO: 1489 - DNA, 322 bp, Homo sapiens
aggtgtatcctacggctgtgactttaaaaacaggtttaaagtggctgtggttggggacatgaatcctggatttcagccccctattacacctgacgtggagactttccaaaacaccgtaggagattgcttcggcatcgcaatggttgcatttgcagtggccttttcagttgccagcgtctattccctcaaatacgattatccacttgatggcaatcaggagttaatagccttgggactgggtaacatagtctgtggagtattcagaggatttgctgggagtactgccctctccagatcagcagttcaggagagcccaggaggg

SEQ ID NO: 1490 - DNA, 156 bp, Homo sapiens
tccggctgctatatttctattgagggatgcatttgccgtctgcctcctctttcttgttgtttgtgttagttgatttgttcgtttaggttctttaagtatgttttgttttcgtcttgtgtttggcttatcatgtattttggtggtcagggtgtcttg

SEQ ID NO: 1491 - DNA, 233 bp, Homo sapiens
tcttataggtgatttctgtcttataggtgattataatcaagtgtaggcttcctgaattttgacatccttttagaacttgggtctggaattccagaaatgttaattgctgcttgtatttgttcttgtttgttttttagccagtatttgccctttctatccagccttatgaataatagcagtaaaatcacagtatcttggtcagtctttatttttttcctttgttcttttttacg

SEQ ID NO: 1492 - DNA, 317 bp, Homo sapiens
tcactcaaaggtttcattgtctgaaatatcagcctaaacgtagtttatgtttaggaagcaacaaccgtaaatagtcccacatccaaacggagtggatttaggtttcactttttcaaggaaaaaccatcaaataaattttccacatacttataaaccatcccacgtatagaatccatttttactgacacaaatttagtaccaataaacgactcttcttctcaatttgttttatttaacaataagtcttgaacgtcattcccagttaacattttgaagagtttcctctctttcgttctgctttagctgcaaagtattct

SEQ ID NO: 1493 - DNA, 314 bp, Homo sapiens
cagaggattaagttgagcatggggcctcattacagggcagggactctgtgactgcactgccactttcccataaagcctgccttggggatggggaataccacgtaggaaagagagtctttaaagtgttctggggacaggttttaaagttatttgaatgacttaagagctcgtgatgtcctttagatacaaaagattttcacgtggggaaggacattaaatttgttttttataaagttcactctggcgtctaatcatgtagaaagactagtaggtaagtcaactaaaaaactgttggatagtctaggaaagtggtt

SEQ ID NO: 1494 - DNA, 313 bp, Homo sapiens
  misc_feature (1)...(313): n = A,T,C or G
taatgttagaggactgtgaaagttggggaaagaagtttagtttgtaggtacttgtttttttgagcagggaattgtcttggctggaggtgaatgtcagataggttaatgtaggcaagtgtagaatggaaatgaaggtgtgatcatttaggaggttatttgtttaggtgagagagttaatgaattaggttttgtattaacgaatgaaaatgggagcagataaatttttaacaaattaagaatcatattttaaaatcagcaccaggcacctagaactcattggcaaatagaaactttcaaaagatataatcaggtn

SEQ ID NO: 1495 - DNA, 314 bp, Homo sapiens
  misc_feature (1)...(314): n = A,T,C or G
gtgccttcccatcagcccctgtgctgggtaccggggaacctggggttcctggtttgagctcagggagagccttgggccactaggggtaccccaacgcggtggaaagcccatgacaggaaggtgagctgtgagggaggagaggtgaggcactactggcagaaaagaaaaagaaaccacgccacggagagcgggacctgggtctcccatggaaaaaagtgccttcccatcagtccctgcgctgggccccgtggacccaggcgaccctggttctaggcctgggtgcacctcangcccgctaggtgtaccccaaagca

SEQ ID NO: 1496 - DNA, 312 bp, Homo sapiens
acagtcagaggtaaagaggtcactgatgatcttggtcagaggagtttcaggagcctgacagggacggaagccggcaagccccgaatcagggaaggagtgggaggtgagaacagatgatcaagggcagatgactcttgcaaggcgtggctgagaagcatagagacacagtgaggctcttgggggacaactggaaggcatggggcactttgattttaactcagggaaccctgagcttacctaagtgcagatggccagtcacagctgcaacccatagactaagaagccatgggccaggtgcagtggctcacacct

SEQ ID NO: 1497 - DNA, 314 bp, Homo sapiens
gcgtgtgtgagtgggtgcatgtgtgagtgggtgcgcgtgcgtgtgtgagtggatgcatgtgtgtgtatgagtgggtgcatgtgtgcgtgagtgggtgcatgtgtgcgtgagtggatgcatgtgtgcgtgtgtgagtggttgcatgtgtgcgtgtgttaatgggtgcatgtgtgcgtgtgagtgggtgcatgtatgtattcgtgggtgcatgtgtgcacgtgtgagtgggtatgcgtgcgtgtgtgagtgggtgcatgtgtgaatgggtgtgtgtgcgtgtgtgaatgagtgcatgtgtgcatgtgtgaatgggg

SEQ ID NO: 1498 - DNA, 307 bp, Homo sapiens
ggaggcggctgtggcattttgctcacattggatacctgattgggacatttatttaaaatgctacccattttcaaatttctgagccaacatcatgatttaattataccggcttcatcgcaagttttacaatccgataaagcaaggcccacttcattagctatttttttctttatataacatgccctaaacattcattttttcttgtgaaaaaatgaaatgcacaattttaataaaattctaattatgacggctgacattccaattaaaaacctgcatttttgtttagagggctctttaataatattag

SEQ ID NO: 1499 - DNA, 251 bp, Homo sapiens
gaacaatacttttctctaacatcgtacgaggaagaaaacaaacacatcagatattttcagcactaaaagagatggctttccccacatatatgtcaaagaaatatgcaagactactggattttgatctcatggttgcagcgggtgaataggtggccttttgtgatctcctacatcaccctggaagtgagacttcttcgggttcttctagagtcagattggtatcagaatggcatagcaacttaaccttgcag

SEQ ID NO: 1500 - DNA, 309 bp, Homo sapiens
tgacctggatcaactatgaacatttacatttattagttaacatctacattggctaaactgtagcatctgacttgatgtcatcctaaaataatatttccttcggagtattttcttcactctgtaattgctaactgctttcctatttgttttgtaacttatttccttaattagagaatatttttaaaaataaaatttgagcaaggattgtagatacctgagatttagtctgcctctgctttaaatcagtgtaccagtttgctaagtttgccataatgaagtaccacagagaacgagtagtttaaacggcag

SEQ ID NO: 1501 - DNA, 309 bp, Homo sapiens
gtgccttcccatcagcccctgtgctgggtaccggggaacctggggttcctggtttgagctcagggagagccttgggccactaggggtaccccaacgcggtggaaagcccatgagaggaaggtgagctgtgagggaggagaggtgaggcactattggcagaaaagaaaaagaaaccacgccacggagagcgggacctgggtctcccatggaaaaaagtgccttcccatcagtccctgcgctgggccccgtggacccaggcgaccctggttctaggcctgggtgcacctcaggcccgctaggtgtacccca

SEQ ID NO: 1502 - DNA, 306 bp, Homo sapiens
  misc_feature (1)...(306): n = A,T,C or G
ggactttggcaaagagcctgcgcaaatgctgtcaccgatattccagtctggatcctagaaaggttcaattctacttcaacaaagaaaatttttgagttataggaataaggacggtaatctgcattttgtctctttgtatcttcagtaatttacttggtctcgtcaggtttgagcagtcactttaggataagaatgtgcctctcaagccttgactccctggtattctttttttgattgcattcaacttcgttacttgagcttcagcaacttaagaacttctgaagttcttanagatctgaagttctt

SEQ ID NO: 1503 - DNA, 283 bp, Homo sapiens
cattatagttgattttgctaaatcttaatttaaaagcctcattttcctagaaatctaattattcagttattcatgacaatatttttttaaaagtaagaaattctgagttgtcttcttggagctgtaggtcttgaagcagcaacgtctttcaggggttggagacagaaacccattctccaatctcagtagttttttcgaaaggctgtgatcatttattgatcgtgatatgacttgttactagggtactgaaaaaaaatgtctaaggcctttacagaaacatttt

SEQ ID NO: 1504 - DNA, 282 bp, Homo sapiens
gagccaccgtgcctggcctcaccattgttaaaattatggaaatcgtgtttgcaaagcaggttggcctgtttggaaaagggtgtcataatttctcaggtaactccaaaaagagaaagctacgaaaattaccttaatacattcattacagtctcagtataagattatagcttcctctcccaaagcgtaaccacaacctgacgcaggatgagttggtttgaaaataccgcatacaatatcctcttgagtagaatcataatttagaactctaaaaatgaccggaaa

SEQ ID NO: 1505 - DNA, 380 bp, Homo sapiens
atggatgaagatttgtcagcctcccaggatcactctcaagccgtgactctgatacaagagaaaatgactttattcaagagcctgatggatagatttgagcatcattcgaacattctccttacctttgaaaataaggatgaaaatcacttgccattggtaccacctaacaaattggaggaaatgaaaagacgaatcaacaacattttggaaaaaaatttattctacttctagaatttcattactacaagtgcttagttcttggtttggtagatgaagtgaaatcaaaattggatatttggaacattaaatatgggagcagagaatctgtggaattattgctggaagactggcataaatttattgaaagaaaaagaattcct

SEQ ID NO: 1506 - DNA, 353 bp, Homo sapiens
ctgatttggagctggctgacaggaagtgcttcaaccccacaggagtatgctgatgtaaaacagagaagaattcagttcccacaacagaaagcaaaggctttagccttattttatgccagactagctgactccagggaccatgatctgtgtttctctgaaaatcattctactttctaatttctctaaacctacaaaaacttttctcctcctcttctcttttatcttcctcctctataacaaccaggcctttgaaggtatcaggggtgggaaagaaaaggtgctaatagggtaatatgtattgaaagaagtcgatgaaataaatttttaaaaacatcaagtaaaataggcaacac

SEQ ID NO: 1507 - DNA, 347 bp, Homo sapiens
  misc_feature (1)...(347): n = A,T,C or G
tccacgggatacctgggcactggtgcactgcacctgactggtggaaagtantactcaccgccatgcaccagcctccctcgccccagtgaaccctgccaaccccaccacctccagagcctcacccctgcaccaacactgccgcaagagtgaaactaggaagggagaacaatggacctcccctaccctgagcagccaccccacctgagtgatcatgcacagagggcaggcacagacctgcacccgccagcacccgacccccatgctaataccaccaccagcacagtagccagcaggggccctcaaagcagtattgcctctgctgctgctgtgaatgcctgcagggaggc

SEQ ID NO: 1508 - DNA, 176 bp, Homo sapiens
tgggaacaatccaaagagtctaagtttcttttccatccagcgtgagtttcctatttagtgaagtaaagctcaacttttatcaatagtttcattctcttgtggtatgtaaaacctacacacactcagaggcacccagaggaaactacactctgaggtattagtaaattctctgcaag

SEQ ID NO: 1509 - DNA, 334 bp, Homo sapiens
ggagtcggactgggagtgaaacccagctcaattcctaataggttgaagatatgattacctcaatgcagtctgcttatcagaaaggcatatcatatcatccggatgttttatatacaatggttggcatacaacaaaagactgttagatatggaaggaagcaagaaaatgtgaccaaatcaagagaaaacaaaaccaaataaagaatatccagataattgagttagcaaatgagaaccttaaaataactgattaacaagttttagatgataaaagaaaagagaacttccgttggaatctgcagaaatggtgtaaaatgaatattctacaactggag

SEQ ID NO: 1510 - DNA, 331 bp, Homo sapiens
tccgataaagcaagtcccacttcattagttttttttttctttatataatatgtcctaaacattcattttttcatgtgaaaaaatgaaatgcagaattttaataaaatcctaattatgatggctgacatcacaattaaaatcctgcatttttgtttaaagggctctttaataatattaaatcttagcactcaagagtcttcgtacatcattgaaatcttttggtcttgttattggaatattcttcacgtaagtatatcatagctaactgaatttatttctaagtatttttacagttttatttcatattttgacattgtgaattggttttttt

SEQ ID NO: 1511 - DNA, 434 bp, Homo sapiens
atatctacatagatctttttgcatgattccaccgattccatccgcacgaattccgttgctgtcgcctaatgtaacaaaactattatctggaagagccaaaatttgaactcagatctctctggccctactaaatgcatcaccataaattatttcatgggcaatctttccctgcaccttaattgatttatttctgccaaatgtatgtgttcctacatctttatggaatattctgacatgggaatgcccccaggtctgtgaagactggcttctctggggttggatcaataaatgaaggaaaattttgcagggggttatacaagatggggggttgaagggggacaaattggtcaatatagctcccttcaaaacaaaaccctcagtatatctttgtgatgccaaactagagattatttcctttgtaaaaagcaaggacg

SEQ ID NO: 1512 - DNA, 423 bp, Homo sapiens
  misc_feature (1)...(423): n = A,T,C or G
cgttggtgtcggggaggagagcttggaagatgtcttatgtccaccccctgacaatgatgatgggggtaatgactttgatattgaagatgaagtagttgaagtagaaaatagggaagaaaacctactgaaaatttctcgcagagtgaaagagtacaaagtggaaattttgaatcctcccagggaagggaaaaagcttttggtgctagatgttgattatacattatttgaccacaggtcttgtgcagagactggggtagaattaatgcggccatatcttcatgaatttctaacatctgcctatgaagattatgacattgttatttggtctgcaacaaatatgaagtggattgaagctaaaatgaaagagctgggagtgagcacaaatgcaaattataagattactttcatgttggatagtgctgn

SEQ ID NO: 1513 - DNA, 426 bp, Homo sapiens
  misc_feature (1)...(426): n = A,T,C or G
cgttggtggcgggggtagaacatatagaaattgaggtcatcgaaagtcaggaaattgaanctcaggagggggaggatgatacctttctaacagcccaagatggtgaggaaaaagaaaatgagaaagatataccaggttctggtgagggtacacaagaagtatctaaacctcttccttcagaagggagcctagctgaggctgatcacacagctcatgaagagatggaagctcatacgactgtgaaagaagctgaggatgacaacatctcggtcacaatccaggctgaagatgccatcactctggattttgatggcgatgacctcctagaaacaggtaaaaatgtgagaattacagattctgaagcaagtaagccaaaagatgggcaggacgccattgcacagagcccggagaatgatagcaaggatn

SEQ ID NO: 1514 - DNA, 384 bp, Homo sapiens
catgcgccaccacacctggatattttttttttttgcattttcagcaaaaattggcctttgccatgttgcccaggctggcttcaatctcctgacctcaagggatcaaccaacctcctcctcccaagggggggggattataggtgggagccactacacctggacagaatttaccttattggaattggcaaaggggaagttcccaaaacagaccatgttctacaaacttgtgtattgtgggccaaggaattgatgcttttttggatccgcaggagcaacaaaattaccctcaccttgcctgggggcgggggctcacacctgtaatcccaccactttgggaggccaaggcaggaggatcacaaggtccagagataaaaaccatcctct

SEQ ID NO: 1515 - DNA, 413 bp, Homo sapiens
cgttgctgtcggatcatttgaagcaaacctcagaaatcactttattcctaaatatttaagtatgcatctctaacttattaaaatttttttggttttgttttttgtttttctgagacggaatttcgctcttgttgcccaggctggagtgcaatggcgcaatcttggctcgctgcaacctctgtctcccaggttcaagtgattctcctgtctctactaaaaaaacaaaaaaaatcagctgggtgtggtggcgggggcctgtaatctcaactactcgggaggttgaggcaggagaattgcttgaacctgggaggtggagattgcagtgagctgaaatcacgccactgcactcgagcctgggcaactgaacgagactctgtctcaaaaaaaaaaggccaggcattgggggttcatgt

SEQ ID NO: 1516 - DNA, 417 bp, Homo sapiens
  misc_feature (1)...(417): n = A,T,C or G
tacggctgctatgaagtctacagaagggtacccctgccaatgttacccttctcaatagcgttgcatttcttgaaagtcttttatcttaaaagttgtatgtggattttcaactttatgtttttattttaaaaaataagatgtgatgttatttttcaaagctcaaaactatgtttaccctataagttacaagcctcctgggccacatattcatttttaagaagcagagaattatgatgacatatggatttcaggacctctgagggaacttgcatggggggaccattaatattgtatgtgcggccgggcgcggtggctcacgcctgtaatcccagcacttgggaggccgaggcgggcggatcacgaggtcaggagatcgagaccatcccggctaaaacggtgaaaccccgtctctactan

SEQ ID NO: 1517 - DNA, 376 bp, Homo sapiens
  misc_feature (1)...(376): n = A,T,C or G
tacccctgccaatgttacccttctcaatagcgttgcatttcttgaaagtcttttatcttaaaagttgtatgtggattttcaactttatgtttttattttaaaaaataagatgtgatgttatttttcaaagctcaaaactatgtttaccctataagttacaagcctcctgggccacatattcatttttaagaagcagagaattatgatgacatatggatttcaggacctctgagggaacttgcatggggggaccattaatattgtatgtgcggccgggcgcggtggctcacgcctgtaatcccagcacttgggaggccgaggcgggcggatcacgaggtcaggagatcgagaccatcctcgctaanacggtgaaacc

SEQ ID NO: 1518 - DNA, 416 bp, Homo sapiens
  misc_feature (1)...(416): n = A,T,C or G
cgttgctgtcgcattatcatggaattgaatattgcttggatgaccgaaaagctttggaaagagatggaggattttctgaacttcagtctcgtcttattcgttatgaaactcaaactacctgcaccagagaaagttttccagtacctactgtgttgagccctcttccatctcctgtagtttcgtcagatcctggaagtgtccctgacggagaagttttacaaaatgaacttcgaactgaagtatcccgattgaaacggagatctaaagatctgaattgcctttatcccagaaaaagacttgtgaaatcctgaagttcagagtctcttctttctcagacaactggtaatagtaatcactatcatcatcatgtgacatccagaaagccacaaacagagcggtccttaccagtgacttgn

SEQ ID NO: 1519 - DNA, 407 bp, Homo sapiens
cgttgctgtcggggctgttgtgagagctataggcttggacgtaaaacaatgctagatgtggtgtctgctcctgagcttaaaagtagcttgagaaagacagtgatattatcagaaaagaatgtgcataatgaaaagttgaaacttttaaaaactcactcaaaactaagttttaaaaaagagccaccgcgcccagcctgagacgtgttttaaagactgacttttgtttcttttctagatataaatttagaaattgagaagtgtattttgaaaaggcataataagaaaaactatggcatataattattttaacttgccatatgaaaacctaaggcacagggaggtaactcgcctacaggtgcagccctaggaagtcagggagccaggattcactgtcagctgactgactc

SEQ ID NO: 1520 - DNA, 400 bp, Homo sapiens
ggcacgaggaatgaatgaagattgtcttattagctttggaggaagctgtcaggtgataggatggacagtatgttgggaaaggtctctctggcatgaagaggtggcatatggaaatggcatctgagctgagagcataggcgggcgagaagccagttgtgggcaaaatgctttctatgaacggaggaagtaagtgcaaaggccctggggtgggaatgtgcacaatgaaaccaacatggtgcagccgagcacggcagtgtggcccacaggaggctggacacccctttgccccagcccatgccttctgggcaggccacacccgctgtcctttctggctgtttagaggaagtagaaatcagatacagaaattcccacctctgttctttgttcctttgtctcagct

SEQ ID NO: 1521 - DNA, 416 bp, Homo sapiens
tacggctgcgttaagactacagaagggctcgaccccacgtcacgccttctagaaccctccacctcaggccgctcgggggcatgccgggatttgttgtgtgtagagggccgctgccgcgagggatgccgggatttgcagtccttccggactacaagcaaaatggctgcttctcgacctcttagctggggcttagggtgtctctggctggccaagagtatgacctaggttcaaatcctcactccgcaagtttcgtatctcagtttccacagtagtaaaatgagataataatagtacatataatcatagagttgatgtgcggagtacatgaatttaaacatctagagccagggcagggcggtggctcactcgtgtaatcccagcaatttggaaggtggaggcgggaggatctcttgagc

SEQ ID NO: 1522 - DNA, 417 bp, Homo sapiens
ggcacgagcctttccaagttctcactgctggaaagagctagaagcacagttcaaagttctggcttctggactctgcagtccaggtctcccttctcccacttgcctaccctcaatgccacactgtttttgaagtggcccataacttgaaggaaaagtttaaagacagttcaatttaatcatcagaatgcattcttttttttttcggagacggagtttcactcttactgcccaggctggagtgcaatggtgcaatgatctcggctcactgcaacctctgcctcctgggttcaagtgattctccagcctcagcctcccgagtagctgggattatgggcgcccaccaccatgcccagctaatttttggatttttttttttaaaaaaaatggggtttcccccaggggggccaagtcttggcg

SEQ ID NO: 1523 - DNA, 387 bp, Homo sapiens
ctatgctttctggaactttgccctttagcaaagtaaattgctcatcatttccggaacatgcagtgttgtttcttgctcctgctcccttttcctggaatggctgcccctgttcctccacctgaaacatccttcttccttcttcaggtcccaagcaggttgtctactacccccatgggctttgcacacacctgcactgtagtatgtgttgcactgtgtggtcatggtttccaggttgattgcagacagcaagcctgggagtttctggagatctcaagagtgaggctccttcagctgtgtgcctccatgcctcacctattgcctcacctgcaacaggtgctcaacaagtgtttgctgttaagtaaaagtgaaggggtggtgacaaaaaca

SEQ ID NO: 1524 - DNA, 404 bp, Homo sapiens
gcttgccagtctttgctttgataggtggtttttgcttaggctacgataaattgtttcatcttttctaaagagggatgaggaagtatttactttgtgagattggaaaaccgtgtggttggtgtggaaaataagcatgttattaataaacagctagtcttgtgctccatactcttggatggaaggtagaaataaccttgcctctattgctgagatttaaaaaaataaaaagctaggctactacccgtgccttcctcgtccacaacacaggcacagggtggcaggtagtgatgagaaacaggctgccaagatggtccctggatgactaggaggtgtgtgatgtgcgtccagttgtctggatggggcaactggaatccttcattgtgtggttcatgcttgtgtgtgca

SEQ ID NO: 1525 - DNA, 416 bp, Homo sapiens
cagaacccaaagcggaagcaggctccaggtctcggagctcatccagcacacctacgagcccgaagcccctcctgcagtcccccaaacccagtctggcagcacggcccgtcatcccgcagaaaccaagaaccgcctcacggcctgatgacattccagactctccatctagcccgaaagttgcccttcttccacctgtcctgaaaaaagttccttcagacaaagagagagatggccagagtagcccccagcccagccccaggacattttcacaggaagtttcaaggagaagctggggccagcaggcccaggagtatcaagaacaaaagcaacggtcctccagtaaagatggccatcaaggcagcaaatctaatgactccggggaagaagcagaaaaagagtttatttttgtgtaaagg

SEQ ID NO: 1526 - DNA, 408 bp, Homo sapiens
ctctgcctcggccggtaaggccgaggacgaggttgaaggatggccgagaggagaccgagcgtgaggggtccgggggcgaggaggcgcagggagaagtccccagcgctgggggagaagagcctgccgaggaggactccgaggactggtgcgtgccctgcagcgactaggaggtggagctgcctgcggatgggcagccctggatgcccccgccctccgaaatccagcggctctatgaactgctggctgcccacggtactctggagctgcaagccgagatcctgccccgccggcctcccacgccggaggcccagagcgaagaggagagatccgatgaggagccggaggccaaagaagaggaagaggaaaaaccacacatgcccacggaatttgattttgatgatgagccag

SEQ ID NO: 1527 - DNA, 413 bp, Homo sapiens
  misc_feature (1)...(413): n = A,T,C or G
cgttgctgtcgccacaaagctattagtagttaatcatataaaacttacctgcttggagaagaacgttggaaaattttgctgctttagcaaaaacttgataaaagtgaggcatttgaaaaaaaggcatttgttgctgtggaactcacattgttaatcatcagtaggtttatatgtaaaaacttggaatggtcttgaaattctcaaaatgttataggaattatttttataaatggtttattttcttacatgctgttttgggttttctaccttactctttgtgcttaaaaggagaaaggtccttactaaaaccacttcccttgtttctttatagaatttacaacgggaatgattttaccaacgaaagctatggcaacccaggaattgactgtcaaaagaaaactgagtgggaatan

SEQ ID NO: 1528 - DNA, 164 bp, Homo sapiens
  misc_feature (1)...(164): n = A,T,C or G
tccttannaaatcactccctgacttaaattttaaatagtgccttgactatcttttacaggaaggaatagtattacatatatcanaattgtttcattcatttttaaataattggaaaactcttaaaaataccacaggaggctgggtaccgggggctcatgcctcg

SEQ ID NO: 1529 - DNA, 405 bp, Homo sapiens
  misc_feature (1)...(405): n = A,T,C or G
cgttgctgtcgggaggagctggaacaggagaggaatcactggcagtctgaattcaagaaagtccaacatgaattggtgatctacagtacccaggaggcggaaggcttgtactggagcaagaaacacatgggttatcgccaagctgaattccagattctgaaagctgagctggaaagaaccaaagaggaaaagcaagagttaaaagagaaactgaaggaaacagagacacacctggaaatgctgcagaaggctcaggtctcctaccggaccccagagggagatgacctagaaagggctttggcaaagcttacgcggctacgtatccacgtcagctatctccttacttctgtcctccctcacttggagcttcgngagatcgggtatgactcaaaacaagtggatggt

SEQ ID NO: 1530 - DNA, 402 bp, Homo sapiens
  misc_feature (1)...(402): n = A,T,C or G
cgttgctgtcgcccagctccctatgctgtggacgtcgccgctcaggtccccaccgtgcctgtgccaccggctgcggtcctctcgccgcctctgccggaagtgctgctgcctgccgcccctgagctcctgcctcagttccccagctccctggccacggtgtctgcctctgtgcagagtgtgcccacccagactgccacacttctgccaccagcaaacccaccgctgcctggcgggcccgggatcgccagcccttgcccaactgtccagctgacggtggaaccagtccaagaggagcaggcctcacaggacaagccgcccggcctcccgcagagctgtgagagctantgaggttctgatgtcacttctggaaaagagctgagtgacagctgtgaaggcgccttt

SEQ ID NO: 1531 - DNA, 407 bp, Homo sapiens
gattcgaattccgttgctgtcgtggacatctaaggatggactcggtgtctcttaattcatttagtaaccagaagcccaaatgcaatgagtttctgctgacttgctagtcttagcaggaggttgtattttgaagacaggaaaatgcccccttctgctttcctttttttttttgggaaacaaagattggctttgttgcccaggcggaggggcgaaacaacaatttgggttttaccggaaacctcggtttcgggggttaaggcaattttccggcctaaccctccaagagtttgggagataccggcctggggccccccccccgggggagattttggtttttataaaaaaaaggggttaaccattgtggcagggcgggtctaaactcccagaccatgggaaccgccctcccg

SEQ ID NO: 1532 - DNA, 416 bp, Homo sapiens
  misc_feature (1)...(416): n = A,T,C or G
cgttgctgtcggcagaaaggaagcggattgctcagatgcgccagcagcagctagaatcggagcagtttctgtttttcgaagatcaactcaagaagcaagagttagcccgaggtcaaatgcgaagtcagcaaacctcagggctgtcagagcagattgatgggagcgctttgtcctgcttttccacacaccagaacaattccttgctgaatgtatttgcagatcaacctaataaaagtgatgcaaccaattatgctagccactctcctcctgtaaacagggccttaacgccagctgctactctaagtgctgttcagaatttagtggttgaaggactgcgatgtgtagttttgccagaagatctttgccacaaatttctgcaactggcagaatctaatacagtgagaggaatagaaacn

SEQ ID NO: 1533 - DNA, 408 bp, Homo sapiens
ggcacgaggcaagacggcggtgaagaaacggaatctgaatccggttttcaacgagactctccggtactccgtcccgcaggccgagcttcagggccgcgtgctgagcctgtctgtgtggcaccgcgaaagcctgggtcgcaacatctttctgggcgaagttgaagtgcccctggacacgtgggactggggctctgagcccacctggctccccctgcagccccgggtcccaccctctcccgacgaccttccgagccgcgggttactcgccctgtccctcaagtacgtccccgccggctccgagggcgcaggactgcccccgagcggggagctgcacttctgggtgaaggaggctcgggacctcctgccgctgcgggcaggatccctggacacttacgtacaatgcttcgt

SEQ ID NO: 1534 - DNA, 412 bp, Homo sapiens
  misc_feature (1)...(412): n = A,T,C or G
caaagaaggtacccctgggagcccatcggagaccccaggccccagcccagcaggacctgcaggggacgagccagccgagagcccatcggagaccccaggcccccgcccagcaggacctgcaggggacgagccggccgagagcccatcggagaccccaggcccccgcccagcaggacctgcaggggacgagccagccaagaccccatcggagaccccaggccccagcccggcaggacctacaagggatgagccagccgagagcccatcggagaccccaggcccccgcccggcaggacctgcaggggacgagccagccgagagcccatcggagaccccaggcccccgcccggcaggacctgcaggggacgagccagccgagagcccatcggagaccccaggccccagcccggcn

SEQ ID NO: 1535 - DNA, 412 bp, Homo sapiens
cgttgctgtcgcccctcgcctcgtctctatggcccctgggggctggaggccttggccggaggagacctgatgcctgcacctgctgaccccacagccagggagggcctggcagccccacccaggagacttcgctctaggaaggtgtcctgccctctcacacgtagcaatggggacctgtctcgttccctgagcccctccccactgggctcttcagccgccagcactgccttggaacggcccagcttcttatcccagacaggacacggagtctcccggggtccgagccctgtggtcctgggctcccaggatgccctgcccatagccacagccttcacggaatatgtccacgcctactttcgtgggcacagcccccagctggctggctcgagtaacttggggagctgaccatgac

SEQ ID NO: 1536 - DNA, 412 bp, Homo sapiens
ggcacgagcctcggcctcgctgtcttctgcagccgctactggaacctccacctcgactccagcggccccgacagcacggaagcatctggataaagaacaggttagaaaggcagtggacgctctcttgacgcattgcaagtccaggaaaaacaattatgggttgcttttgaatgagaatgaaagtttatttttaatggtggtattatggaaaattccaagtaaagaactgagggtcagattgaccttgcctcatagtattcgatcagattcagaagatatctgtttatttacgaaggatgaacccaattcaactcctgaaaagacagaacagttttatagaaagcttttaaacaagcatgggattaaaaccggttctcagattatctccctccaaactctaaagaaggaatat

SEQ ID NO: 1537 - DNA, 385 bp, Homo sapiens
cgttgctgtcggcacaagccaatttttcctatgatcaaaaaattctttctttcctctgagtgagagttatctatatctgaggctaaagtttaccttgctttaataaataatttgccacatcattgcagaagaggtatcctcatgctggggttaatagaatatgtcagtttatcacttgtcgcttatttagctttaaaataaaaattaataggcaaagcaatggaatatttgcagtttcacctaaagagcagcataaggaggcgggaatccaaagtgaagttgtttgatatggtctacttcttttttggaatttcctgaccattaattaaagaattggatttgcaagtttgaaaactggaaaagcaagagatgggatgccataatg

SEQ ID NO: 1538 - DNA, 396 bp, Homo sapiens
  misc_feature (1)...(396): n = A,T,C or G
cgttgctgtcgggccatcttgtcttgtcttattcagggcagnggaagctttacccacttcctactcttcttcatgttattgaagcccagctaaaatgaaccaacttagaatataaaattattttaatatttcttcatctgacttctaatcccattgttctttttgctgtatctgaagatagtcccaacttctcaaatatgttattaatttctgggctgtaaaatgaatatggaagagggactcaaattttgtaaatgctgtggggttacaaatcaccaattgtcctctgcctctgtgttgcctcagcctaccgcaagacctccctacacacacacacacacagacacacacatccctgaagtcactctaaatatcagtaattatgaaagtggcccg

SEQ ID NO: 1539 - DNA, 393 bp, Homo sapiens
cgttgctgtcggtccatcttgtcttgtcttattcagggcagtggaagctttacccacttcctactcttcttcatgttatcgaaccccagctaaaatgaaccaacttagaatataaaattattttaatatttcttcatctgacttctaatcccattgttctttttgctgtatctgaagatacacccaacttctcaaatatgttattaatttctgggctgtaaaatgaatatggaagagggactcaaattttgtaaatgctgtggggttacaaatcaccaattgtcctctgcctctgtgttgcctcagcctaccgcaagacctccctacacacacacacacacagacacacacatccctgaagtcactctaaatatcagtaattatgaaggtggc

SEQ ID NO: 1540 - DNA, 392 bp, Homo sapiens
cgttgctgtcggccaatttttcctatgatcaaaaaattctttctttcctctgagtgagagttatctatatctgaggctaaagtttaccttgctttaataaataatttgccacatcattgcagaagaggtatcctcatgctggggttaatagaatatgtcagtttatcacttgtcgcttatttagctttaaaataaaaattaataggcaaagcaatggaatatttgcagtttcacctacagagcagcatatggaggcgggaatccaaagtgaaggtgcttgatatggcctacttcttttttggaatttcctgaccattaattaaagaattggatttgcaagtttgaaaactggaaaagcaagagatgggatgccataatagtaaacagccctt

SEQ ID NO: 1541 - DNA, 359 bp, Homo sapiens
tgggagagatataaacaaataaggaaaatagtttgcataactgacttagaacagaatactgaaatcagtccagcataatgcatgagcaagttagtaagaagattagattggctggcattgaggcaaatgtaaagttaatttggaatttggcagactatactgtggatataaaaaaatgactagagccagaccagccaggtttaaatcctagctcttccattcactgagcactcacacaagtcacttactctctgcacttacctcatccatagcactgttgcgaggattaaaggaggcaatgcttgtaaaattcttataacagttcctgtacataaaaaattatccataagggccgagcg

SEQ ID NO: 1542 - DNA, 355 bp, Homo sapiens
gtctttattgaatggaaaggtgtcatgtgagacacaaaaatataaaatctttagattgctttattttaaaaacaaataagatacttacattattaacagaagagcatactggtttcggtccataaaatctttgggaagggacaactgtaaaggaagttcttttaaagaaagagcaaaatattaaagatggagagtcatttacaggtaaaactataagacgcagagaaagttgttcttgaataacatagcatgcacaaaattttaccatagtcgtcaatatgaaggattttaatttctggctttcctatcttcttcttcaggatagcttccttcagcatagaattgctttccaatg

SEQ ID NO: 1543 - DNA, 357 bp, Homo sapiens
gtttccccagttgtctcataagagctttgtcatggttggtttgttagaatcagggtctcaatggagtagttgcattgcatttggcttattcatcttttaagtctcttctgtattttactagcctcctttcttttcttgccatttgtccagtagagtttttctattttagatattttattttgttttatccttgtggcgatgtgaattttatttccattggtgataaaggtcaatttaagctatgtgatttcttttggtatactttgaataagaaaatacagaatgacaacaaactactataaattcagtaacagattcaatttaatttgtatttcatgtgagcaaaacagctgaaaa

SEQ ID NO: 1544 - DNA, 360 bp, Homo sapiens
aggagaaacaacagagggatattttcataaactattaattctatcaactaagaacaaatcagcagaaacgttcacagctaccattaccagcattccatgtgagtataaagattctacaagacttacttcacgataatttagtatgattatttcttctacagtttttgctataagaggccgaaccccttcctgtcctaatctaaaaataccacagtacaccctccccaacatgaccgactcttcagcatataaaatgctaactaagcttttccgaatgcacaatttgggggttttcctttcttcttctttatacatgtctatattggttggcttttggtttggtttgtcatttttctacca

SEQ ID NO: 1545 - DNA, 384 bp, Homo sapiens
cgttgctgtcgggagaatcaagaggcacatgagcaagatggaaatgatgaactaaaggactctgaagaatttggtgaaaatgaagaagaaaatgtgcattccaaggagttactctctgcagaagaaaacaagagagctcatgaattaatagaggcagaaggaatagaagatatagaaaaagaggacatcgaaagtcaggaaattgaagctcaagaaggtgaagatgatacctttctaacagcccaagatggtgaggaagaagaaaatgagaaagatatagcaggttctggtgatggtacacaagaagtatctaaacctcttccttcagaagggagcctagctgaggctgatcacacagctcatgaagagatggaagctcatacg

SEQ ID NO: 1546 - DNA, 369 bp, Homo sapiens
ctcgagcccacgtgacgccttctagaaccctccacctcaggccgctcgggggcatgccgggatttgttgtgtgtacagggccgctgccgcgagggatgccgggatttgcagtccttccggactacaagcaaaatggctgcttctcgacctcttagctggggcttagggtgtctctggctggccaagagtatgacctaggttcaaatcctcactccgcaagtttcgtatctcagtttccacagtagtaaaatgagataataatagtacatataatcatacagttgatgtgcggagtacatgaatttaaacatctagagccagggcagggcggtggctcactcgtgtaatcccagcaatttggaaggtggg

SEQ ID NO: 1547 - DNA, 355 bp, Homo sapiens
tggtgcagactaacaacagaggagagctcctaagctatggtaatgagtgacccttacaccagtggcttcagggaggggaggtggtgggattcctactgaagaggagaaggaatgagcagctggtaatggagtggaaaaacggggatgcagtgcaccctttcaaaagttggtgatgaccagcagtatgagagagagaaaatagtagtggagatgaggggtgggtataaaaaacaccccgaattttttttttagaaaaaaatggctttaaaaaagtatggtaaaaattttggtaacaatttggtgtttctattttagcaccattttgttataaatgttgttttttttttattcgcga

SEQ ID NO: 1548 - DNA, 363 bp, Homo sapiens
atctaaatttgtcagcaaattaaagagtttgagattgggaattgagataaagctatttagttcttttatgtttaaataatttacttcattctgaaatcttataaatggattctcaactttcaagtagtattctccagatagaagaagaggtggttgctgctcatgtagatctataaatatgcggtgtatgccttttgtgcttctttctccgaaaaggaccaccccctttttcccctcttccgatttcttgtcacctttctcgtccttggctgcatccatcccccttccgttatcccgtcttcgcgtcccgtcttttttctcctgctgtctatcactcttgcctgcttccccgtcggcttaccg

SEQ ID NO: 1549 - DNA, 356 bp, Homo sapiens
taaacgccagatggaagagatgcatatatcaggaagggtatgagggaaggggcatggggccagccactctccaggaacctgcatgcgttcagctactcagaagctcgtgacgggcaatgctaatatgaatatttatctcttttaagtcttatcatttttctatcatttcttgatgctaaaacctgctttataacacacagttgactcttgaacaatacaggttcgaactgcatgagtccacttatatgcactgttttttcaataaatatagcgagagtcttttggaaatttatgacaatttgaaggaactgtcagatggaccacatatggtaaaaatatcataagaattactaaag

SEQ ID NO: 1550 - DNA, 381 bp, Homo sapiens
cgttgctgtcgcctaaggtagcaaaactagtagctggaagagccaaaatttgaactcagatctctctggccctactaaatgcatcaccataaattatttcatgggcaatctttccctgcaccttaattgatttatttctgccaaatgtatgtgttcctagatctttatggaatattctgacatgggaatgcccccaggtctgtgaggactggcttctctggggttgtatcaatagatgaaggaaaattttgcagttgtttatacagtttggggggttgaggtggtacaatttgcacatttttgttcctttcatagcaaattcttcagttttctttgatgaggccaagcaataaattttttcctttcttacgagcaaatact

SEQ ID NO: 1551 - DNA, 377 bp, Homo sapiens
ggcacgaggggaacgtggctttccctgcagagccggtgtctccgcctgcgtccctgctgcagcaaccggagctggagtcggatcccgaacgcaccctcgccatggactcggccctcagcgatccgcataacggcagtgccgaggcaggcggccccaccaacagcactacgcggccgccttccacgcccgagggcatcgcgctggcctacggcagcctcctgctcatggcgctgctgcccatcttcttcggcgccctgcgctccgtacgctgcgcccgcggcaagaatgcttcagacatgcctgaaacaatcaccagccgggatgccgcccgcttccccatcatcgccagctgcacactcttggggctctacctcttt

SEQ ID NO: 1552 - DNA, 397 bp, Homo sapiens
  misc_feature (1)...(397): n = A,T,C or G
cgttgctgtcggagattgatagaggcagaaaggaagcggattgctcagatgcgccagcagcagctagaatcggagcagtttctgtttttcgaagatcaactcaagaagcaagagttagcccgaggtcaaatgcgaagtcagcaaacctcagggctgtcagagcagattgatgggagcgctttgtcctgcttttccacacaccagaacaattccttgctgaatgtatttgcagatcaacctaataaaagtgatgcaaccaattatgctagccactctcctcctgtaaacagggccttaacgccagctgctactctaagtgctgttcagaatttagtggttgaaggactgcgatgtgtagttttgccagaagatctttgccacaaatttctgcaactgn

SEQ ID NO: 1553 - DNA, 396 bp, Homo sapiens
cgttgctgtcggaggaaggagattctggccaagctggagaagctgcggaaagtaacaggcaacgagatgctgggcctcgaggagggggaccttgaagacgacttcgaccctgcccagcacgaccagctcatgcagaagtgctttggggacgagtactacggggccgtggaggaggagaagccacaatttgaggaagaagaagggcttgaagacgactggaactgggacacgtgggacgggcctgagcaggagggagactggagccagcaggagctgcactgtgaggaccccaacttcaacatggacgccgactacgaccccagccagccgaggaagaaaaagcgcgaggcccccttgacgggcaagaagaagcgcaagtcgcccttcgtcgcgggc

SEQ ID NO: 1554 - DNA, 386 bp, Homo sapiens
  misc_feature (1)...(386): n = A,T,C or G
cgttgctgtcgccaatgtgcccttcctggtggccctggcgctcctgagctccgtcctggtgggccttgtcctggtccccggcctcctgcaggggccgctggcgctgaggaacatcactgacaccggcttcaagctgctgctgctgggtctggtcaccctcaacttcgtgggggccttcatgctggagagcgtgctagaccagtgcctccccgcctgcctgcgccgcctccggcccaagcgggcctccaagaagcgcttcaagcagctggaacgagagctggccgagcagccctggccaccgctgcccgccggccccctgaggtagtgcaggcccacgggcaccccagacactggaactccctgcctctgagccaccaactggaccn

SEQ ID NO: 1555 - DNA, 392 bp, Homo sapiens
  misc_feature (1)...(392): n = A,T,C or G
ggcacgaggcaagctaggggttcggccccctgcctctgggcaggaaaccttctggcgaattccagccaagctgagtcctacccagctccggagggcagcagcttctttgagtcaaccagaggaggaacagaagctgcagccagagctgcagcctaaagtccctggagagcaaggctctgatgaggagcactgtaaagagcaccgagcacaagccctgagggccctcttgctagcccacaagaagaaagcgggcctggcatccccagaggaggaagacgctgttggtaaagagccgctgaaggcagcacccaagaaacgacaattgctggacagcgacgaggaacaggaagaagatgagggcaggaacagagcaccagagttgggagctccan

SEQ ID NO: 1556 - DNA, 261 bp, Homo sapiens
ctgactttccttatcaacatcccagaaagtcttcagctttaataatgcttcgccttccttgcttttctagaatcatattctaaaaagacaaagcaaaacagataaaccagtgtccctaatacaatatattcatttaaaacattctaacatcttgggatgctctgatacttggtcttatttttctaatctccttatatttaccatcaaaagtatatgtgttgagcatggtactagtataaaaagcacatagaccaatggaac

SEQ ID NO: 1557 - DNA, 331 bp, Homo sapiens
tacggctccgagacgacgacagaagggctgaaggaaaaacagatccctccttcttgtttgactttgtatagaatgaattttaatgtaactgagcccacctttagtatagctttttctcattataaatagaagtggttgccagtattcttgcttgccttttaaaatagcaaacatttagtgataaaaatcttgttctgttctctgtatgtcagtttattcatctgtaaagtagagacaataatagcatctatttattacaagcaattgttaaaattaaaaacaggctgggcgcggtggctcccgcctgcaatcccagcactctgggaggcca

SEQ ID NO: 1558 - DNA, 335 bp, Homo sapiens
caggtccgaagttggacccactattcctctggggcaaactgacattggcttgattgggcatggtggctaaggcctggctttatagcactccgttatgacctggaatgtgcatcacttcaacaacagatgcattcatcttacggtccaacatgaggaagacgtgtgtcatgttaaatacaaaaattatcctggcgtggtggcacatacctgcgatcccagctactcaagaggctgaggcaggagaatcacttgaacccaggaggcagaggctgcagtgagccaagattgcaccactgcactccagtctgggcgacagagagagagagactgtctca

SEQ ID NO: 1559 - DNA, 371 bp, Homo sapiens
taccgctgcgagaatacgacagaagggaaactatctgaactggctttattcactcttcagcatatttaagttggatttcaacctctgtcattccactgaaatcactcttgtcaacaaccttcatgttgtcaaattcaaaacacagtcttctgtcctccgtgctcattttttcaacagtccctgcttgccctttaaaggacttcttttgcttcagttacccttttaggtattgtcatagtcctctggtctctcatgagcaggatttggcagctccttgtattctatcagttcgccaaatagatatttgagatgacatcacaagttctcttgtctttctacttattttaaaagatggtatctacacatttttt

SEQ ID NO: 1560 - DNA, 331 bp, Homo sapiens
  misc_feature (1)...(331): n = A,T,C or G
gcactacacatagttatttctgaaaagaaatcagtatgtaaatagaaatccaacagaaatgataggtgtactatcaattctttattgttgggttcgaaagcaatcacttgaggttaaaagataattttaaaatattaatattctcatatttactattttggtcccaatgcatgtgtataccaaaatagtaatatgtagcacacatgatttaattgctcttttcaaaaacacttaaaaggaatctatgtttaaagaatattcacataatcatacaggcatggtggctcactcctgtaatcccagcactttgggaggccgaagtgggtggatn

SEQ ID NO: 1561 - DNA, 338 bp, Homo sapiens
  misc_feature (1)...(338): n = A,T,C or G
acaagggtaaggaattagtgtgctaatgttctctgcttacaaagtgggaagtcagttggctttctagggtggctgggacaaaatatgagacttaagcatgttgattaaagatacagaggtgaccagtagaagaactaagaatagtgatgtcactatgggggagaggggtagatgagctaaattcttgtctttcatagcagtaggttaaaagtaaatgtccaaagctgattagtaagaaatagcagttgagggcacggtggctcatgcctgtaatcccagcactttgggaggctgaggcaggtggatcacctgagttcaggagttgagactaacctggn

SEQ ID NO: 1562 - DNA, 343 bp, Homo sapiens
  misc_feature (1)...(343): n = A,T,C or G
gatatctgaaaaggaggttaatcgatagcttttacatagtacaactgctttatcctttcaaaagcagatacgtcaatcaaaacttgatatttatttatctatatttatgctgagttcccttaaaatgttttgtctttttccatataaccaatcatattatttcctaaaaataaacttaggtattgtcacagggatagtaacttctgctttccatattgtgtgtgtgtgtattttgttttgtttcgtttttttgagatggagtctcactctgtcgctaggctggagtacagtggcgctatcttggctgggattacaggtgtgagccacggcgcccagcctgtcn

SEQ ID NO: 1563 - DNA, 344 bp, Homo sapiens
agaatcccagaagagaaatggaaatcataagagaaacaaattgaaattctagaactgaaaatataatatcagaaaagaaaaaaaaattactcaatggaaattagagatgattagacacttcgaaagaaagtatcagtctcactcacactgaagaacagagaataaaagatagaaaatattaaccagactgcagagaactgtgggacaatagcaagctgactgaaatatgtgtgattgaaataccagaaagaaaagagagagagagagcatgaagtaaaatatttttaaaagaaataggatttttaggccgggcgtggtggcttacacctataatcccagcactt

SEQ ID NO: 1564 - DNA, 332 bp, Homo sapiens
ctcgaccccacgtcacgccttctagaaccctccacctcaggccgctcgggggcatgccgggatttgttgtgtgtagagggccgctgccgcgagggatgccgggatttgcagtccttccggactacaagcaaaatggctgcttctcgacctcttagctggggcttagggtgtctctggctggccaagagtatgacctaggttcaaatcctcactccgcaagtttcgtatctcagtttccacagtagtaaaatgagataataatagtacatataatcatagagttgatgtgcggagtacatgaatttaaacatctagagccagggcagggcggt

SEQ ID NO: 1565 - DNA, 343 bp, Homo sapiens
ttctaattagtagaaataagggctaaggaatctttggatcactgaaatctaactattctttaattgaaatgtgggtatgtttctgacttatagtaagaactaaaatgaattctatttattctcaagtgagagcaaagagaaaaattttaaatggcataataaagagcttataaaacaaaatatgaggattttggaaaatcatttattgaaatagtactaggatatttagaagtatttagaagcttaaattaattggcttttctttatgacattatctctattacgataatattatattattttttaataaaggccctaatggaaatctcaaatagggttggtt

SEQ ID NO: 1566 - DNA, 375 bp, Homo sapiens
cgttgctgtcgatagagaggagataactttactaaaatcatacaacacagaattagattaatcctagcagagctaatctcagacctttactcagactttttctgtagctttagtctagaagttggcaattcatctattatttgtcactgattcctagcatgatttgtagcaaattctttattcttattgtgcctcagattctacctatataaaatatatgtgacttaaaatattcataaagataataagaacaacttcaatttctattttatttttacttacaatagttttcactttcacatacattaccctacttaattttccccatattatggatgaggaagttaaagctctatgtggtagatgtcacatcca

SEQ ID NO: 1567 - DNA, 141 bp, Homo sapiens
gaggaattaagtgagtaaaaaaggcaagctacagagtgggagaggatatcaaggatacatgtatctgacaaataatttatacagaatatatttttaaactctcaaaaatcaatacacaaaagacaagctaccctccaaaac

SEQ ID NO: 1568 - DNA, 327 bp, Homo sapiens
tcctcaaatatcttcttgtcctggaagcctaaagtgactccctacacagagggagtagaactgtcttgtggtttctcaagcacagctctctattttaatgcatatatgaagctgtctttcatctgtgcagatgtttgctctgccagactgtgagctccttgaaggtggggattttgtctggttgttttttccccagaataagaatgctgggtatatacatgtctagataatggtttagatggatggatagatggtgaatgaatggatgagtatatgtatgggggggtataaggaagggcctcgttttttctgccggaaacacactct

SEQ ID NO: 1569 - DNA, 344 bp, Homo sapiens
gcctctcactcataggaggggcccaggaaagagggaggaggcaagaaggggaaggagcacaaggagtgtgggtgaggggtgtaaccatgagggcaggcagggggcaggacggaaggcaggagggcctggccaggggaggcctcaggaggatgagcaggaggcgagaggagacagactatgaggccagagggagaccctcacctgagaatctcctttagcgtgcggtgcaggaatgcataattgtcatcgaatttgtaccaaggcatgaatggctgaccttcactgtacacaaagttttcccagcagtatgcaaattctgagacgaagaggcaggaagcagtcag

SEQ ID NO: 1570 - DNA, 321 bp, Homo sapiens
agtcatataacccaactatttaagtaattatcaagttgcttcacttctatgtgccttaaattcctcgtttgtttaatgagggttataacaacactgacctcataagggcattctgaagattagatgaatttatacgtaggtagtaattaaaacagtttttagtacacagaaaagtacttagtaatttttagctgttattattactagaagttcattcttttgttcattaattcatgaggcacaggtgcctttctcggtgtttggcatacataaaacaccataataaatgagagtccatattcttatgcagagtgagaagaa

SEQ ID NO: 1571 - DNA, 345 bp, Homo sapiens
  misc_feature (1)...(345): n = A,T,C or G
tacggttgttatagacgacacaaaggatcattaaattacattttaaaatgttaacaactacaagcagatacatctgggatattggttatgagaggatatcattttcttttcttaccataaataaatattatttattttattgaaattgtgcttttaagaatgctatagaaaattcaaaaggaggacaggtgcagtggctcatgcctgtaatcccagcactttgggaggccgaggcaggtggatcacctgaggtcaggaattctaaaccttgccagtatgggtgaaaccccgtctctactaaaaaatacaaaaagttaccaggcttggtggcatgcccctgtagan

SEQ ID NO: 1572 - DNA, 313 bp, Homo sapiens
gtagtcctagctattcatcaagctgaggtgggaggattgcttgagcctgaaaggtcaaggctgtagtgagtcatgatcatgccactgcactccagcctgggtgacacagcaagaccctgtctcaaaaaaataaaaaattaactaaataattttttctcagttttaattcctaatataaacaccaatagatataacaaactgaaacaaaagttctttagggtgcccaataatttttaagtgtgtaaggggattgtataaccaaaatatctgagaagcattaacttaaaactaataaaggagaaagactttatta

SEQ ID NO: 1573 - DNA, 313 bp, Homo sapiens
gttagtaaacataccattataatagcaatcataaaggtcccaagaaataaatctgacagctgtatcaaatatttgaggaaaaatgaacctttattaaaatcgttaaataatacttaaatatagataaatctgttattgaaaggaaggcaatgttataaaaattcagtcttcccaaattaatctataaattcccactcaaaataagtttgatcttgacagagtgattttttttttcttttttttttttaaaaagggagtctgactttgccccccaggcggaagggcaggggaacaaccacgcttaaatgaagtg

SEQ ID NO: 1574 - DNA, 326 bp, Homo sapiens
ccctgcatgcctcctcatcggcagttgagaccccactgctgcctgctccttcccattccattgcggggacctggacttgatctagccctgtctggtggacacacttttgtaggtgccaggagggaggaatctgctcctcctttctgcccccgacagcccccagccccagtggccactcactcccagcatgccttgcagctgcctgagtgggagactgtggtggactcggagctggggcagggaggacaagcttcttctggaagggcaatgggcagagggtgacctggtctttcacggtggtgtcaaggaccatagagccaggccac

SEQ ID NO: 1575 - DNA, 314 bp, Homo sapiens
gttcaaatctggtctcccacatgttagctaagagacctacaaattatgttatgttacctctctgtatctcagtcttctcatctggtaaattaagctcaataaggacagagactttgtttactgtcataaatatcatcagcacctagaaacatttgttgtactgaatgaatacctgtgcagtgaatgaagggaagaaatatttcataaatgttgtggtaagattcacgtgagttaaaacatataaagcactaagaatagccatggcacaagaaatgctccattaatggtaattattattatttcagcaggcaagg

SEQ ID NO: 1576 - DNA, 322 bp, Homo sapiens
ggaagttgggtcatatccatgaatctgtttctgcctagttaatatgtaaactttgacggaaatactttacgaaaaatttgatgtaacgctatttcaatttttagatacaaccattttaaaaatttgaataccacccaaaacccgatgaaatggattagggaaagataaaaaaacaaaacactaacaaaatacttgactcatctcacactttatagcccaagaaggctttaagtaaataaggtgtaccatgttttatgtaaaggctcggggtatgacagaaacacagtgtcccagctgatctcatagatatcaaacagacctt

SEQ ID NO: 1577 - DNA, 316 bp, Homo sapiens
  misc_feature (1)...(316): n = A,T,C or G
catgttctttttgccactaagcagcgtggcccacagcagtctcagtatccgctacgccctagtctgtccatctgtgagatgaagatgagagaaattgccacaggaccttgtagtgcactaacagcttggagttttttagccatgtaaagaattaaaatgaggatcatctctttatcataagattgcctcctcttgtaaagtaagtcactgaataagaaatgatttaccacagacaagcaaatgctgagagattttgtcaccaccaggcctgccctaaaagagttcctgaaggaagcactaaacatggagaggaacn

SEQ ID NO: 1578 - DNA, 291 bp, Homo sapiens
  misc_feature (1)...(291): n = A,T,C or G
cacaggatccagggaaaaaaaacaaccaaataatacttgaaggtaagtcccaagatgtcagctatgaagtaagcagtcagtccagattggagcagaagattggaaggtttcagggggactgcttccagggaaaaataaaaatgataaattattattttcattttccatgcaacaaatatctacggagaatatattatgctttgagcctgttagaggcactcaggctatagttatgaacaaaattaagtttctgacttcttgaaatttaccttctactgaaacttanagttt

SEQ ID NO: 1579 - DNA, 134 bp, Homo sapiens
gagggtaagaggggagccaggagtgggaagctggggaagccagagcagcagaggctggagcaaatcccgtgggaaagaaccaggaatgggtggttcctgagggagtggctcaaacaccctcgcaggggggtggg

SEQ ID NO: 1580 - DNA, 320 bp, Homo sapiens
  misc_feature (1)...(320): n = A,T,C or G
tcaggaatttatcaggctggttagactctttgtaacttgaaattagccatggttggagtatacacatggatattggaaaatactataaatcagaactattcctggttaatatgactacatatgaagaccaaagcacagtaagggtttctgttgttagacaaaatcaaacaaaagggaaatgttttttgacataaactatagaataagaagatatgaaacaaacataaatatacattgcatataataacaattattattactatttttgagaaggagtctcgctcttgtcgcccaggctggagtgcagtggcgcacgatcn

SEQ ID NO: 1581 - DNA, 324 bp, Homo sapiens
tcactgggccttaggtgactggaggcctggggtctggcggggccagaaggattaggccttcaggtggccaaggagacctggtagccagcttcaggacaactggaagtgaacaggtgatgaggtgggactctggactgagtccagccagaattccccagttcttggaatagaggtggtagggtggccagctaggatgcccgacaattcccagcaggtcctgctctgcctgtcacagcagacagacatggccagctgaaatggcacctgccaattgggattgaaaaataaaaatctggccaagcgcagtggctcgctcatgcctgt

SEQ ID NO: 1582 - DNA, 304 bp, Homo sapiens
tggggattgggttaacgtatataaaatattagatggtggtaagaagagctaataagtgtttgctaaatatataagcccagggccagcctggcttcctcctcatcctcctcctgctcacctggcctggaccccaacctctcccctagcactgagctcactgcccaggtcccacagcagcactccaggcctggactatttctacagccatctctctgcacctgtctttgtccgttgctgcagctacaacaaaatatcatacattgggtgctctggccaggcgcggtggctcacgcctgtaatccca

SEQ ID NO: 1583 - DNA, 315 bp, Homo sapiens
ggaaaagtagtgttgggggatttgctatatgagaagtcaaagcatactgaaatgctgcagtaatataaatggtgaacacaagaatagacagattgacgcctggagcaaagtagaatccagtaacagacccatttttatatcagaatttagtatatgataaagttggtgttttgcaacagttgggaaattataattcagtgtgttgtatagggataaatggctctttatttagaaagaaagatcctacttcacattcaaaataacttagatggattaaggaactaactaaaaaaacctataaaagcattagaagga

SEQ ID NO: 1584 - DNA, 270 bp, Homo sapiens
tacagacacaaatgaatgaagagacctgccttatggagggggaagagtgctccagtctgtgggaacagcaggcaggaagaccttcaggcaggaacatgcttgactcttccatctgagggtcagaaatgggggccctatgattgaagcccgtgaccagggagtgggtattagcaggaaatccaatgagaagggtaaccaggagccttccttttctcttcataaaaatttgtaggattgtcaccagaaatggggcctgatccagatcccaag

SEQ ID NO: 1585 - DNA, 336 bp, Homo sapiens
tattcctgttttgagacaaaagatcgctctgatgcccaggctgccattattggtggcttaatttgcttacattaaaggaatgactatatgttgtggctaaaactacctactttaacgactgaaaaaccaaacattctttgcaaaaccatgtatgataaagaaggtaaaaacatttttcattttctagacacttaaagacactgaatttaaagcagattaagtagcaaaaacattgtcagtaaaaatattgctgaataggacatgatgaggtagttattattcaaatcactgatggagactacacacacatatagttataaagacacatggtactgg

SEQ ID NO: 1586 - DNA, 376 bp, Homo sapiens
tctacaattgtgtggtactacctttatattgagctctttgctgatatttattatataatttattataaacaataattcataattttatagttcatcatctgatggtgttcaccttcattaaagactacataagtctaaattctaaagaaagttgcatgcagcatctcatgcctatagtcccagcaatttgggaggctgaggtgggaggatcacttcagcccaggagtttgagaccagcctggacaagatagtgagacctccatctctaaaataaaaaaaacaatagccaggcatgctggcgtgtgccggtggtcccaactacttatgaggctgaggtgggatgatctcttaaccctaagagtccaaggctacaatg

SEQ ID NO: 1587 - DNA, 402 bp, Homo sapiens
cgttgctgtcgagccaactcctttctcccgagcctgctggcagatcctcccccacctctccgcaggagttcccctcctaggctgggagcatcccgtgcagggtaaatcttttcaagccaccaactgctgtccccaaggaaatggtgtccgaaaaatcccaccttggcaacccccaggagcctgtgcaggaggagcccaagacccgcctcctgagtatgacagtccggagaggcccacggagagagctggttgttaaaaagagcctgggcaggccaggcacggtgactcacgtctgtaatcccagcactttggaaggccgaggcgggtaaatcacctgaggttgggagttcaagaccagcctgaccaacatggagaaaccccatctctactaaaaatacaaaa

SEQ ID NO: 1588 - DNA, 395 bp, Homo sapiens
cgttgctgtcgcctttctcccgagcctgctggcagatcctcccccacctctccgcaggagttcccctcctaggctgggagcatcccgtgcagggtaaatcttttcaagccaccaactgctgtccccaaggaaatggtgtccgaaaaatcccaccttggcaacccccaggagcctgtgcaggaggagcccaagacccgcctcctgagtatgacagtccggagaggcccacggagagagctggttgttaaaaagagcctgggcaggccaggcacggtgactcacgtctgtaatcccagcactttggaaggccgaggcgggtaaatcacctgaggttgggagttcaagaccagcctgaccaacatggagaaaccccatctctactaaaaatacaaaaa

SEQ ID NO: 1589 - DNA, 384 bp, Homo sapiens
  misc_feature (1)...(384): n = A,T,C or G
cgttgctgtcggggagcacgttacgtccggacgcgtcggtggtagggctgggtctccgaacctgaaaccgggagcttcctgctcgtgttcgctgttgagaagctacccgcggggttgtagacttcggacctcatggcagagataattcaggaacgcatagaagatcggctcccggaattggaacagctggagcgcattggactgttcagtcatgcggagattaaggctatcattaagaaggcttccgatctagagtacaaaatccagagaagaacccttttcaaggaagactttatcaattatgttcaatatgaaattaatcttttggagctgatccagagaagaagaacacgcattggatattcatttaagaaggatgagatn

SEQ ID NO: 1590 - DNA, 437 bp, Homo sapiens
  misc_feature (1)...(437): n = A,T,C or G
ctataatacagctacttgtcttttgcggntacatcgattcgaattcggcacgagcacacacacatttacacacgcaggactctggagccagagtagaggctgtggcccaggcactacctgctggctcccacctatggtttgggggccatacctgttccagctctgttcccagggtggggcagggaggtgggggttgggggagtantgnnnnncnttttnttntattcttttccctttgtgttttacgttttgacttacatctcatccctgattggctcgctcatatctttaaactggtgttgttatcacgtgctgcgtatcaactgaccttcatactcgcctctacctgtcctctctctctctcgtattaatagtttttttttttctagaatcttctgtaaatccgaggttatgatctgggtatgctcactatgacc

SEQ ID NO: 1591 - DNA, 450 bp, Homo sapiens
ggcacgagcagggaccaagatggatcttctcctcgacatcagctaagcctggaggactcttcccctcagagaccatggagagggacagccacgggaatgcatctccagcaagaacaccttcagctggagcatctccagcccaggcatctccagctgggacacctccaggccgggcatctccagcccaggcatctccagcccaggcatctccagctgtgacacctccgggccgggcatctacagcccaggcatctacagctggtacacctccaggccgggcatctccaggccgggcatttccagcccaggcatctccagcccaggcatctccagcccgggcatcttcggctctggcatcactttccaggtcctcatccggcaggtcatcatccgccaggtcagcctcggtgacaacctccccaaccagagagtaccttggtagaacaaccg

SEQ ID NO: 1592 - DNA, 336 bp, Homo sapiens
gggagggcctattctcacgtggatggaggagggtaatgggacccacccaagtggggcataggacccccaagactctatggctttcactcaccattcattgcctatctcttcaccaacctgagtcacttcttagtttcatgtttctttctatatctctgagattataacatagctgacaagttcaatgaagtcttactaagggtagtattagtattgtgctcaacagttgacctggagcatctttcttaatcctttgagaggtgctgtgattgtctccactgtccaggaaagaaaactgaagattaaaaaggttttgggcctggcatgggggtcatg

SEQ ID NO: 1593 - DNA, 373 bp, Homo sapiens
  misc_feature (1)...(373): n = A,T,C or G
cgttgctgtcggccaggttggacttccggctccgtcctttgataactgtgtgctcttgggcaaatttcttaacttgcaggttcttgtgaggataacatgagttaattgagggcacttaacactacctggcacagattaagctcatctgaagtgggagctgttacttaggggcgtttgcctagaacacagggtccagaggctctctcccggaaacttagacccagtgagtcagaagtgaggcctgcaaaaagcagcaggagtggggttaagaattccagcctagggctggatgcggtggctcaggcctgtaatcccagtactttgggaggcccgaatgggaggatggcttgaggccaggagttccagaccagcn

SEQ ID NO: 1594 - DNA, 349 bp, Homo sapiens
  misc_feature (1)...(349): n = A,T,C or G
accaatgggggggggcgagacaattactttacaaaaataaaaatgtaaactttctgcctttaatgtttagtgcttaaccaccaatctctgctcctgtctgtaaaagtcagacttcattaattttgctgacacagtaagttctcatggaaaatagtgacaacagccagcaatgtgaatagttacatcttggctctgtaaatatcaaaacagactttgctaagcagaaatcaatagacactcgatcaaatagtctggttctatttttttatttttattttaatttttttgagatggagccttgctctgtcgccccagatggagtgcnnngnnnnnntctcgggtccactgc

SEQ ID NO: 1595 - DNA, 328 bp, Homo sapiens
aggcacctgagagtcacttctgggcagaaagacaaacacatgaatacaagccataaatgaaaagaatcaaccagttacaccattaaaaatgtctgaatataatgccagtttctacgagtgtggagggtgcatctctgagatggtgaatttcttcccacctaaaagcagggtgacctaggaggaattcgtagtgtcctttcacttattttcagacaggctcaagattactttcaataaataagtataattgttcataatttgaagaatgtacttacctgatgacatgactttaaatgtcaaaaagctaaaagatcacacaccaacaccg

SEQ ID NO: 1596 - DNA, 338 bp, Homo sapiens
cttcgtgacctggactgaaaacattttcaagttctctatttcggtcaatacagcccctttaataattccccaaagcatctcccctttccgcctgtgctacgactctcttgcacacgttttgtattcccacagatcacaaaatcacaaagcaccggagctggaagaatcttaagagataatccaaggccaggagcggtggctcacgcctgtaatcccaccactttgggaggccaaggcgggtgggattacctgaggtcaggagttcaagaccagcctggccaacatggagaaaacccgcctctactaaaaaaacagaagttaaccccgcctcggcccgc

SEQ ID NO: 1597 - DNA, 355 bp, Homo sapiens
gtcattttatccattcaccttttaggacactttggttgtcaacagtgttttgcaactatgaatatagctgttatcttactcttttttaaaatgcactttaggtgtactcattccttaggttgagtacacctaaagtgcattttagatatactaatcatctctgtttctgtaatgtcattatcattaaaaacatctcattgtgttatatttatatgctcataattctttttttcttgtagtcaactgtaaatctcttaaggacttagaccatgtctaatacatctgtgtattcctggctcctaaactggatttcagagattatttttagctgaatgaatttgccaggcagtgtatg

SEQ ID NO: 1598 - DNA, 329 bp, Homo sapiens
atttacaataagtttacaatttacaataaagctttaaaagaacaacaaaaaattaaatatacctctattgcttgtacgtttttctacttttgatagaaacatggacatattaaatatttcacttttaactctagtataagaaagtcaataatgcaagagtgatgataaagagcaactctcacttggcatcatgatcagggagcaatagggagtgggtgactgcggtgacctaaagcatacaagccttgtctaaagtgaacagctgctctcagccctagctcataagtgccacagagtctacaggcctagacctgctgatccccagcatt

SEQ ID NO: 1599 - DNA, 335 bp, Homo sapiens
caaaacataaatgtattactcaaaatgttttatataggggcacaagagttctttgactgaagcagtttttattttaagttgtttggcctgaaaccattcctggcagcaaaaatctttttaaaagtcttcatgtgtagatttaagctatccttggcataaaataattaatatatctatatttcaaagagcagatggcagaaaggactataccgaaatatattttatttctgagcaccagcataaaaacaagagaaaaaaaaagaacagccagaatacagaggtttttagggctattctaagtgatactatactggtggagacatgtcattatatat

SEQ ID NO: 1600 - DNA, 124 bp, Homo sapiens
ctttcactacatattaaatgacactttataactaatataataggacaatcatcaatgcatatatagccagcccttcatatctgtgggttttgcatccaggattcaaccaaggaggaattgaaaa

SEQ ID NO: 1601 - DNA, 348 bp, Homo sapiens
cggggttgatagggaaccagcgcattgaatatccttcctttacattcatggtactactccctgatctcactatgatgacgtagggcacagccttacttaatgcacacagaatggggctctcaagccaaataggcgtctgaacagactggatctactagaacagaaattctagggactgaactttctgtgacacagagatggcttttttttttgagggtctcgttctgtcacccaggctggggggtggcacaatcttgactcactgcaacctccggctcctgggttcaagccattctcctgccttagcctcctgaatagctgggattacagatgtgcaccaccatccct

SEQ ID NO: 1602 - DNA, 337 bp, Homo sapiens
  misc_feature (1)...(337): n = A,T,C or G
atcgtatgaactacaactattaaaatgtgaaatgcatgatgcaaatagtgcacaaaaaaatagagtgaaaatgatgaatacagccataaaagacagccaaactccattttagcaataaagtaaaatataatctgctgtcaggggaaggtaatttgaagtacttgagatgttctttaatttaaaaatccaaaaatatttttagctttagttactataaaacatgtttaagcattttccatttgaaataaaattttaatttcatgctttgtcagtttccctaaataaatagaaaatagtaaaatatcgcatactanaaaaatcaacttctttggtaata

SEQ ID NO: 1603 - DNA, 358 bp, Homo sapiens
  misc_feature (1)...(358): n = A,T,C or G
atctgataagattattttaaggacagaatgaagatttcctcttgaatgatttgctctgccctttatcaaaaagacatgtgtctgtccaccttaacatttctggtataaatataccttgtcctttaaaaattactgcataacattaaaatcacgagcattgctatacatcatcaacagtcaagccagagagccaaatcaggaatgaactcccattcacaattgccacaaaaagaatcaagtacctaggaatacagctaactatggaggtgaaagatctctatgaggagacctacaaaccactgctcanagaaatgagaaatgacacaaataattggaaaaacattccatgctcatgggn

SEQ ID NO: 1604 - DNA, 417 bp, Homo sapiens
cgttgctgtcggtaagagaaggagaaggagaagggattaagttttacctagtcacatagccaatgtcagattcctaactagtggccgggtccgtctgatccaatgatcactattctctcatttatggtgtagtcactgtgtggcttcaaccacagtggacctctctggacctaagtgccctcacttgtaaattaaaagaactgggttagggccaggcatggtggctcatgcctgtaaccacagcactttgggaggctgaggcaggtcggtcacttgagctcaggagttcaagaacagcctgggcaacgtggcaaaaccccgtctctaccaaaaatacaaaaaattagccaggtgtcatggtgtacatctgtggtcccagctactgggaggctgaggtgggaggatcacttaatcccg

SEQ ID NO: 1605 - DNA, 379 bp, Homo sapiens
cttcatgacctggactgagaacattttcaagttctctatttcggtcaatacagcccctttaataattccccaaagcatctcccctttccgcctgtgctacgactctcttgcacacgttttgtattcccacagatcacaaaatcacaaagcaccggagctggaagaatcttaagagataatccaaggccaggagcggtggctcacgcctgtaatcccaccactttgggaggccaaggcgggtgggattacctgaggtcaggagttcaagaccagcctggccaacatggtgaaaacccgtctctactaaaaatacaaaaattagccaagcctcggccggacacagtggctcacgcctgtcatctcagcactttcagaggcg

SEQ ID NO: 1606 - DNA, 382 bp, Homo sapiens
tacagttatagccaggttggacttccggctccgtcctttgataactgtgtgctcttgggcaaatttcttaacttgcaggttcttgtgaggataacatgagttaattgagggcacttaacactacctggcacagattaagctcatctgaagtgggagctgttacttaggggcgtttgcctagaacacagggtccagaggctctctcccggaaacttagacccagtgagtcagaagtgaggcctgcaaaaagcagcaggagtggggttaagaattccagcctagggctggatgcggtggctcaggcctgtaatcccagtactttgggaggcccgaatgggaggatggcttgaggccaggagttccagaccagcctgagcaacat

SEQ ID NO: 1607 - DNA, 328 bp, Homo sapiens
ttggactagagattgttgttacaagaactttaaaaataaaaaaataattaaaaagacttatttttctgtatcattcttactggttcatttgtttaataggacttaagacatgaaaaaatcaaactagtaaatttgcattcatacttgcttacctacttaaatatatagaagtaatgcagatagtggtaaaagtcttgagtagttcaaagaagtctaattgaaatactgtggattaaaattttattttctattatttcttttttcagataattactgatttttaaaatgtgttgattggccgggcgcggtggctcacgcctgtaatcct

SEQ ID NO: 1608 - DNA, 356 bp, Homo sapiens
tatctgccaaaatttgtttggtatatataacagcttttggagagattttcactgctatgcttttctttcttttatgctttgttatttggagttttaatttctcaaatgatcccttctttttagatttcaaattataacctatttcctgcaccattgctgacgcctggtgatccatgtcagaagtacttccaggtcagatacattttctcatatttcaatgcagagaagcagttgaatattaaaacttaaaaaaagataatgtttaatgttaaacttatgatttactaaaataacatgttttttaatttcattgttcttcactaatgtaatagaaaaatgaatcttggccgccgcgg

SEQ ID NO: 1609 - DNA, 374 bp, Homo sapiens
cgctgctgtcggcctggattacatatttagatcctatctctataaaaaatcaaaaattagccaggcatggcggggcatacctatagtcctggctatttgggaggctgaggcaggaggattgctttagccctggaggtcgaggctgcagtaagccatgattgcgccactgcactcagcccgggtgacaaagcaagaccctgtctcagaaaaaaagaaaattcatggccagttaagacaaaatgctatgactttgaaattcacagaaagaaataacagtttacattacgtcttcaggtattcacgatagaaataatctcctgaaaaacctgaatttcagagattcttagactggctgccaaaggatgacactagcg

SEQ ID NO: 1610 - DNA, 294 bp, Homo sapiens
gattttttggtacctttcttagggatatcatagtttgagataccatgaaagatgttcaggcagagccttttcaacgaaatcaccttgctgtggtcttcacagagtctagttaatagaagttttgcactggctgggtgtggtggctcactcccgtaatcccagcactttgggaggctgagacgggcggatcacttgagcccaggagttcgagaccagccctggcaatatggtgagttcttgtctctacagaaaacaacaatttacaaaaaataaataggcatggtggcacacccc

SEQ ID NO: 1611 - DNA, 358 bp, Homo sapiens
gagactgtgccactgcacttaagcctgggtgacagagtaagactctgtctcagacaatattgtgatgatattgttatttttgaaacttttataccgcagagaacagagagagactgcgacgtatataccctacaaagggctttttctctggtagagcctggaagggctagaagtaaacttttaaaaattcaagatagaatcgtgatgagcaagcctcatgcacatgcatgaggatggctactaccaaaaaggcagaagataacaagtgttggtgaggaagcagagaaactggaactctcatgcagtggggttgagaaggtaatatagtgcagccgcggctgggcgcagtggctcacgg

SEQ ID NO: 1612 - DNA, 377 bp, Homo sapiens
ggcattatgtctttcagataggatgatgctgattatgtttggaaatagctaatctttctaagaattgaaaattgttttctacatttttcatccacttacagatcaaagaagaaatctgttttatatatgtcaattttcctatagtggattgtcttaaaatagagcacgtttgatttacaccagatttatgttgtgacattagttacaaatttggtaaaaacatttctaattagagatgatcaggtaaatcttgacaactgttgagtaactgctagtaatgctcttgagatttattttttatttgatatcagatttataattcaagtaaatatctgagtagaagctaatgcaaagagataattactatattctaaggg

SEQ ID NO: 1613 - DNA, 355 bp, Homo sapiens
  misc_feature (1)...(355): n = A,T,C or G
aatggcacttaatcacttaaactaatttaaattaaataattggttatttaaatcatctttttcatttattctctactttatttgtttgtcttccctgcctgaagggaggagctaactgcattagaggtgttgaaattcaccgttagatgatccctgggctagaattttaaaggatgtggggatttatcaggtagggaatatagaggcaaggaagatgtaggtgtatgtactcattcgtatttaacttgtccagtttattaagtcatttgaattttgtcagaagctagatcacttctagtagtttttaacaaagtaattctcaaaaacccaaactattgatttggtttgcctcccn

SEQ ID NO: 1614 - DNA, 401 bp, Homo sapiens
cgttgctgtcggtttgcttcaggatgtttgatttaaaacagaggttcttccctttccggacagggtcagaatgacctgggttctctccaaggttgtgtacaagagctccacaccttctgttcagaagaccaaggacagtggcagatgccatggcctgttgtgaagcgaagttggaggagggagaattctacaacagatggtttcttggatatctggggcctgtccagctctagctttgaaaatgatgggccagaccttgaactggcatggatacaggcttaagtgccagaacaggaagtgaggtcctagggtgatgtctttggggcagctgctgctactcagctggtgggctggcaccgctagctttggcttcctatggtttggtgaggagattgtgtgtg

SEQ ID NO: 1615 - DNA, 387 bp, Homo sapiens
tacggctgttatatatacgacagaagggccatacagtaggaggaggggtacctaacctttcacaaacaacaacaaatgtgaaaagtcagtgacacactggacagaagaaacagtgagaccagcaggccatttaatctacattattctctccaggcttttaaaaataattatgccatcatgtgctttttgctgctattatgtcataattgccttacatctcaaatcattaattaaaatggattttaagagtacggaattggctgacttacaagatcacttattaatccgtgcccggatgtgttgtttcttgcttacagagacacccttgaccgttactctttcgcggaatcgttcacaatggcattcttacaacaacaggatatcgcg

SEQ ID NO: 1616 - DNA, 386 bp, Homo sapiens
  misc_feature (1)...(386): n = A,T,C or G
cgttgctgtcggcagaaatctacatggaaaaagaaagttaagagtcttcctaatattctcaccgatgatcgatttaaagttatgtttgagaaccctgacttccaagtagatgaagagagtgaagaatttaggcttctgaatccacttgtttcaaaaattagtgaaaaaaggaagaagaaactaagactcttagagcaacaagaacttcgtgaaaaagaagaggaggaagagccggaaggaaaaccaagtgatgcagaaagttcggagagttcagatgatgaaaaagcctgggttgaagaggtcaggaagcaacgcagactcctccagcaggaggaaaaagtgaagcggcaggaacgactcaaggaggaccagcagacagtcctaan

SEQ ID NO: 1617 - DNA, 380 bp, Homo sapiens
cgttgctgtcggcccttagattttggagacatcaggcagatgtctccaaaaatgattgtgatcaagaatctgaattataagattcacagtctgctccccaacccagtgctgccaactgtacagctgcgcctccacgaaggggcatatgccaggctcgtctgaccctggaatgaggatgtaggaagcaggcagagctccggttcagccctcacaatgggactgaagcaggagagaaggctgggcagaagggctgtggggaagtagggcttgtctccatggatgacgtccagaaggatgtcaggaggaggaatatcacaggagttatagacattggagggaacagagactggcacaggacctcttcattgcaggaagatggg

SEQ ID NO: 1618 - DNA, 389 bp, Homo sapiens
  misc_feature (1)...(389): n = A,T,C or G
ccaggctggtcttgaactcctgacctcaagtgatccgcccacctcagcctccaaagtgagccaccgcacccggcctgttactctattttctacttactatttacaactgtcagaaggtaaatgacaacctgatttttgttgctttttaagtcacttatacctctcactagtgatacacatcttttttatttcagaaaatgttttattataattataacattttagtatttgttcttttcttttgctttggcttggttctttagaaccttctatttatgtatttgatcttcttgaactggcttctatggtagtctctttctctcaggactttttttttgttttgccactttcttcatttccatccaattttagaaattatcctcatttgn

SEQ ID NO: 1619 - DNA, 328 bp, Homo sapiens
gaggcaagctgcaagaaggccatggggacaatgtgcagagcaatgaagcctcctgcccatagtgactgtacccgcgacctggtggtgaccaggcaggcatttgcacctgctgggctccagagctccccttctttcttcactcggtgacagcaaaccaagacttgggtcacatcatttctgggtaagtatgcagagatgctgaaagaacagtgggagcaaaaagaacaatattcttgaacgtcttctgttttctctatgacccttagaaacccaaagaaaatttcacagtaggaaaataatccattgcacaaactgtatttttaaaggg

SEQ ID NO: 1620 - DNA, 374 bp, Homo sapiens
tacgcctgcgagaacacgacagaaggggttgtcagccacccgcagtgctctttctctgaaagtggtttggaagactggctaccatctgggtgcgaggaatcattagcagcgaggccaagtttgaggagcctgagaggagctgtgcgccaagaggagggtttttcttttccgagaatccagaggcccttattatctgcttgctttctcagctgaacccttgcccccggatcccccagcaaagccctctgaggcggattttgtattcatcttgtgattgatccttcagatatctgaacggtgcgatcctcggtcccgtgtgtaatcactattctccctcatagcctcgttctccttaacgcttcctcatctacgtg

SEQ ID NO: 1621 - DNA, 366 bp, Homo sapiens
ctttgtttcaaaaagcttatcccatctctaagaataacagtggtaacaacacaaaatattgttttaaaaggaagaaacaaatctaaacaagaagttccttactgcctataaaatctgaaactttcttttttttttttttagaaaaggggtttcctttttgcccccagggggggaagaattggggtaatttcaaataattgtaaatcactcctccgggtaccccccatttttccggcacatttccccgttttattttaggacaaaagcacgcccccccctccaccaaatatttttggcggggctcatacaccacacggctcatgtaacaacctccgcattatttataacatttatcttgtgttagca

SEQ ID NO: 1622 - DNA, 349 bp, Homo sapiens
accagtgagccatgctgctcctttaaataaaatgaggggtttggaagagaaaatgaagagaaatccttgggaaatttgagagaaatgagtaaagaaaaagaaaatatatccttttaccagagttttccttcttaaccctgacttggagttgctctttgctctggaggagagctctagatgggctgggagatttggatctcacttgcagtatttctcaaaagcagctgtgcaaacccaggcaagtcattctgcctctttgggtgacaatttcctcccttgaaaagtgaaaatgatgtctccctgtctgtcctatcagtgggtaaggaaaatcagatgaaatgatggctac

SEQ ID NO: 1623 - DNA, 345 bp, Homo sapiens
gttcatatacaggaatcaaatcacattgacacacatagtcactttgtcctatttaaattctcttttaattctttagattacatagagaagaaagactcagtttgctgctagtatttccttaaaacatctcaactctctctctctccctcttgaacagagcaaaggccagctctgattcagaattctcagctagcaacagtatctagctacaatttaacaacatcgtctgggaatggtatatatttttatatttatcttctattttggcaaatgatactggatttccatttatagtaatgatataaagtttccttaataaatgcatttatctaagtcaataattgg

SEQ ID NO: 1624 - DNA, 377 bp, Homo sapiens
ttgtaaaacctggaaggacaaggtttgggcatggcatcagagctgaatgaaagcttgccatcatggtgtactggaaagggacagatacatggtgaatgccactgttctggactttgtgttcattggtaataaatgaaggagctcaacttgtttttgcaagagggacatttgcaataattaatctagggacagagagatactgtaaagatcaatgattatgatttgggatccggcctcagattaaccagggctcaaaactctcttctttctcttaataaaagagagaatgtactgacttttcgaatgtactcgccttaacttcccagtatgttcttaatgtttaaggcatactgctctctcctcctaatcttgtaccc

SEQ ID NO: 1625 - DNA, 332 bp, Homo sapiens
  misc_feature (1)...(332): n = A,T,C or G
gactaaagaaaatcccaaaagccaataaataaatatttacatatatggtatataaaccttcatttgtccttgtgtcctggttcccaaaaatataaagggtaagtctgctcctctaattcactccaatctcagtccgaacactgaacttgtgtctaccacaggcccaatcctgctgtttgggtggagtgcctgacagtggggggagagagggaagtaaagtttttggtacctcaagcaaatgccaccttgtaatgaggctttctccctttggtcaccggcctgtaccctatattatttggagtctagaaggtccaagttctgaacaagattan

SEQ ID NO: 1626 - DNA, 416 bp, Homo sapiens
cgttgctgtcgaaaatacgacagaaaatagaagaaacacgtgcacagagagtccagttaaagaaattgccaaaagttaacaaagagctggcacttaaattaattgaggaagaagaggagaagcagaaatctacatggaaaaagaaagttaagagtcttcctaatattctcaccgatgatcgatttaaagttatgtttgagaaccctgacttccaagtagatgaagagagtgaagaatttaggcttctgaatccacttgtttcaaaaattagtgaaaaaaggaagaagaaactaagactcttagagcaacaagaacttcgtgaaaaagaagaggaggaagagccggaaggaaaaccaagtgatgcagaaagttcggagagttcagatgatgaaaaagcctgggttgaagaggtcaag

SEQ ID NO: 1627 - DNA, 398 bp, Homo sapiens
aagacggcctacggttgcgagttgacgacagaagggagcctattttatgagataagtactattttgttaaaattttatatttaatatagataataaattgactaccccaaatggtggaatgcaaggatagcatattacaaggaaaatgttacaaacaactaacattaactagacaaaggatgaaataatcatttcaaaaaaggttgaggaggctatcagtaaaattcagtatctattactgataaaaatgttggaggaaaaagtgtatcagaaaatataatcatgggccagtcgcggtggctcacgcctgtaatcctaacactttgggaggccgaggtatgtgggtcacctgatgtcaagagattgaaaccagccttggccacgtaatgaaaaccctg

SEQ ID NO: 1628 - DNA, 409 bp, Homo sapiens
  misc_feature (1)...(409): n = A,T,C or G
cccgttaactccattatatgccaatagagcgagactccgtctcanaaaaaaaaaaaaaaaaagaaaaaaattcctttgaaaaaaaacccccccctcaaaggaaaccttttttttggggggggggtttttcaaaaaaaaaaattttgaaccctgttttttacccattggggaaaaggggggaacccggctggggcctcccccaaccggggggggggggggaaaaaaccccgggggcccccaaaaggccccccctaatgcccgctaggggcttccttttttgccccccatttttgggggaggggggatttttaataaaccccttggggcttcagccaaaaagggtaaaaagggaacccgttttcctggggcaaattcctgaaaaaaggtggtgaaaaagcccactttgggc

SEQ ID NO: 1629 - DNA, 381 bp, Homo sapiens
cgttgctgtcggcacgcctgcccccttgggtgacctcttgtacccccaggtggaaggcagacagcaggcagcgccaagtgcgtgccgtgtgagtgtgacagggccagtggggcctgtggaatgagtgtgcatggaggccctcctgtgctgggggaatgagcccagagaacagcgaagtagcttgctccctgtgtccacctgtgggtgtagccaggtatggctctgcacccctctgccctcattactgggccttagtgggccagggctgccctgagaagctgctccaggcctgcagcaggagtggtgcagacagaagtctcctcaatttttgtctcagaagtgaaaatcttggagaccctgcaaacagaacagggtcatgtt

SEQ ID NO: 1630 - DNA, 334 bp, Homo sapiens
tgctcaaaccagctaacttttctaagatcctgtttccccatccataaactgaaataatcagagccctacctctttcagaataagtaaggagtgaatgaaatattccatatgacatgctcaacataatgcctgccacacagaagtattcaattagtacttaattcttgttatatttttatcattatttggatttaactatcttgctgagttgtttggaagccaaatgaggtcattgcctccaaacatttattagagatattgctatgtgctaagcattacaataggtgcaggagaatacaaacgtgaatgcctgcaaggaacttacaccagaagg

SEQ ID NO: 1631 - DNA, 418 bp, Homo sapiens
cgttggtggcgcaggcagatgtctccaaaaatgattgtgatcaagaatctgaattataagattgggagtcgggtccccaacccagtgctgccaactgtacagctgcgcctccacgaaggggcatatgccaggctcgtctgaccctggaatgaggatgtaggaagcaggcagagctccggttcagccctcacaatgggactgaagcaggagagaaggctgggcagaagggctgtggggaagtagggcttgtctccatggatgacgtccagaaggatgtcaggaggaggaatatcacaggagttatagacattggagggaacagagactggcacaggacctcttcattgcaggaagatggtagtgtaggcaggtaacattgagctcctttcaaaaaaggagagctcttcttcaagataag

SEQ ID NO: 1632 - DNA, 385 bp, Homo sapiens
  misc_feature (1)...(385): n = A,T,C or G
cagaactggagcgtggcgatggcgttaaggttttgagggagcgagccacctagcggaggctgtccttcaccgcgggcgccaatggggagcagaaggactcggacacaggaccgccggggtcctgcttgtcctggggcagccacgagggagccctcgtcaggagcgccatgggccgaagctgcctgccctctgcacgtggatgtttctttggaacaaggggaaaaattatgactttcttattttgctttgacctgtgaatgacaccctggtctctggtgcctggggtgtgctctctgcagtgctgtcaggcacatgctggttccttcagcgctaggtgcttggcaccttcagtcttttgctgacgccatggtcgttcctggggccn

SEQ ID NO: 1633 - DNA, 407 bp, Homo sapiens
ggcacgagccaaaatggatctatgctgaagccagctgtctgtactcgtgaactatgcgttttctccttctacacactgggcgtcatgtctggagctgcagaggaggtggccactggagcagaggtggtggatctgctggtggccatgtgtagggcagctttagagtcccctagaaagagcatcatctttgagccttatccctctgtggtggaccccactgatcccaagactctggcctttaaccctaagaagaagaattatgagcggcttcagaaagctctggatagtgtgatgtctattcgggagatgacccagggctcatatttggaaatcaagaaacagatggacaagttggatcccctggcccatcctctcctgcagtggatcatctctagcaacaggtcaca

SEQ ID NO: 1634 - DNA, 374 bp, Homo sapiens
cagtctctactaaaagacagaaacaatacactgccaaaatgttaagttgaccaccgtgaaacttctctattggagtgtctgtttctttaagctgtgaatactgaaattatgccttgtctcctccccaccccagggggatgccgttttgcagtgtggacacgtgtttgaagcagttactaaactcgtcatcctggttaagaaggagaacattgtcaatgttgttcaaggaaggtaggtggcttcatcttcagctcaggaagtaattcaatgttaaaatgcttattaaggccgagcgtggtggctcatgcctataatcccagcactttgggaggctgaggtgagcagataacttgaggctaggagttcaagaccag

SEQ ID NO: 1635 - DNA, 333 bp, Homo sapiens
cagtctctactaaaagacagaaacaatacactgccaaaatgttaagttgaccaccgtgaaacttctctattggagtgtctgtttctttaagctgtgaatactgaaattatgccttgtctcctccccaccccagggggatgccgttttgcagtgtggacacgtgtttgaagcagttactaaactcgtcatcctggttaagaaggagaacattgtcaatgttgttcaaggaaggtaggtggcttcatcttcagctcaggaagtaattcaatgttaaaatgtttattaaggccgagcgtggtggctcatgcctataatcccagcactttgggaggg

SEQ ID NO: 1636 - DNA, 393 bp, Homo sapiens
ggcacgaggagaaggaaaacactggatttataagccacgtctgggaagttggaaaaggagaaagaagcaaaggaaggctctgaaccaaaggagcaggaagaccttcaagagaatgatgaggaaggctcacaagatgaagcctcggagactgactactcatcagctgatgagaacatcctcaccaaagcagatacactcaaagtaaaggatcggaagaagaagaagaagaaaggacaggaagcaggagtattttttgaagatgcatctcagtacgatgaaaacctctcgttccaggacatgaacctttcccgccctcttctgaaggccattacagccatgggcttcaagcagcccaccccgatccagaaggcgtgcatacctgtgggtctattg

SEQ ID NO: 1637 - DNA, 402 bp, Homo sapiens
cgttgctgtcgcaaggcgcgttcgagcagcggcgaccgacgcggcgaaggagcgcgccatggagcatgtgacagagggctcctgggagtcgctgcctgtgccgctgcacccgcaggtgctgggcgcgctgcgggagctgggcttcccgtacatgacgccggtgcagtccgcaaccatccctctgttcatgcgaaacaaagatgtcgctgcagaagcggtcacaggtagtggcaaaacactcgcttttgtcatccccatcctggaaattcttctgagaagagaagagaagttaaaaaagagtcaggttggagccataatcatcacccccactcgagagctggccattcaaatagacgaggtcctgtcgcatttcacgaagcacttccccgagttcagccagaa

SEQ ID NO: 1638 - DNA, 382 bp, Homo sapiens
cgttgctgtcggagcgcgccatggagcatgtgacagagggctcctgggagtcgctgcctgtgccgctgcacccgcaggtgctgggcgcgctgcgggagctgggcttcccgtacatgacgccggtgcagtccgcaaccatccctctgttcatgcgaaacaaagatgtcgctgcagaagcggtcacaggtagtggcaaaacactcgcttttgtcatccccatcctggaaattcttctgagaagagaagagaagttaaaaaagagtcaggttggagccataatcatcacccccactcgagagctggccattcaaatagaagaggtcctgtcgcatttcacgaagcacttccccgagttcagccagattctttggatcggaggcag

SEQ ID NO: 1639 - DNA, 176 bp, Homo sapiens
ggcctacgtgttcttgcggtggcggagcggcggattagccttcgcggggcaaaatggagctcgaggccatgagcagatataccagcccagtgaacccagctgtcttcccccatctgaccgtggtgcttttggccattggcatgttcttcaccgcctgggtcttcgtttacgaggtc

SEQ ID NO: 1640 - DNA, 405 bp, Homo sapiens
  misc_feature (1)...(405): n = A,T,C or G
cgttgctgtcggaaagatggcgtgtgtggtcctcctccatcaaagaaaatgaagttatttggatttaaagaagatccatttgtatttattcctgaagatgacccattatttccacctattgagaaattttatgctttggatccttcattcccaaggatgaatttgttaactcggactacagaagggaagaaaaggcagctctacatggtttctaaggagttgcggaatgtgctgctgaataacagtgagaagatgaaggttattaacacggggatcaaagtctggtgtagaaataacagcggtgaagagtttgactgtgctttccggctggcacaggagggaatatatacattgtatccatttattaactcaagaattattactgtatcaatggaagatgttaan

SEQ ID NO: 1641 - DNA, 406 bp, Homo sapiens
ctacaaaaggttctttgcttggttgagatgtctgaaaagccttatattcttgaagcagctttaattgctctgggtaacaatgctgcttatgcatttaacagagatattattcgtgatctgggtggtctcccaattgtcgcaaagattctcaatactcgggatcccatagttaaggaaaaggctttaattgtcctgaataacttgagtgtgaatgctgaaaatcagcgcaggcttaaagtatacatgaatcaagtgtgtgatgacacaatcacttctcgcttgaactcatctgtgcagcttgctggactgagattgcttacaaatatgactgttactaatgagtatcagcacatgcttgctaattccatttctgacttttttcgtttattttcagcgggaaatgaag

SEQ ID NO: 1642 - DNA, 320 bp, Homo sapiens
gttcactatgtaagttaaaatatcaaagagggatatacaactgaaaagtaaaagttcacctttctttcctttctcctacttctataatttgatcagtttagataaaatatctctgcttttcaaaattactctctagctggctcttgaggaaaaaaaatgggggtaggaggagctggggccttcccttatttatacaagccgatgaagaggtcctagacttttggagagtcacagtaaagaaagaaaaccagtcacctgatttaaacaaacaatatattcaggtttctgaatctagatttctagttccagtctttgaacag

SEQ ID NO: 1643 - DNA, 316 bp, Homo sapiens
tatccttcaaaactgaatgcaaaatagagatgtattcagacaaaaaccaagaaaactttgcactagcagaccaaacatgcacagaatgagaaactaaaggaaattcttcaagtagaatgaaaataatgccaggtaaaacatgaaaatacaaaaggaaatgaacagtgacaaggataaatgaatactgagtttacaaacagtgaatgtaatgtcctgtggggtctgaattatacatagaatacaaatgcacaataacaatgcgaaaggcagaaagaggtaaattcatttaaaggttacacagttctagcagtactga

SEQ ID NO: 1644 - DNA, 317 bp, Homo sapiens
tatctgctgtaatatttttatctgaggtagggataaaaacatcccatttctggactttacttggagaaccagctagaggtgaatatacgacccttcatgacctggactgaaaacattttcaagttctctatttcggtcaatacagcccctttaataattccccaaagcatctcccctttccacctgtgctacgactctcttgcacacgttttgtattcccacagatcacaaaatcacaaagcaccggagctggaagaatcttaagagataatccaaggccaggagcggtggctcacgcctgtaatcccaccactttg

SEQ ID NO: 1645 - DNA, 323 bp, Homo sapiens
  misc_feature (1)...(323): n = A,T,C or G
atctggttagtacaatgcacttaaatatgctgtgtgtgtgcgtgcgcgtgtgggtgagtatgaggcccatctttctctctgggcccattcttttcacagaattaacgtatgtacccatcagatttggtttaagatctatattatggtgaccacacaaatcacatcttgtctactgatctgactcctatgttattctgtctgaggttgctattgggctctgtgacctttgggaacttgcttgatttctctgccatttttatccctatctcagatgcgtattttgaaattttaatgtcattgttaatgtgaagaactcagccagn

SEQ ID NO: 1646 - DNA, 351 bp, Homo sapiens
tacggttgcgcgacgactacagaaggacacgaaattaaagcatatagaggtcaagtttttctccaatgttactgcgataacatatggcaaagacaaaattgtcaaccagggtatttgagttcagagaaaacactcttagtgaatatgttagagtgtgagagtcataaacagcacattgcttttacactgaacttctacacatatttgagcaactgggtgatttaaaaaaattattacacggatgatgaattattaagcaaatactgaactttttaaattggagatattttaatacttatataagaaattgcaggttttcacgtatcatagctttacatatcccacagaggg

SEQ ID NO: 1647 - DNA, 267 bp, Homo sapiens
ctactgtcattatgtctggctaacaggagaaactctgtgagtagctattaattaacaaagacaaagcacattaaagagaaaatggaaggagggagggaggaaggaaagtaaagtttgagaggaaaagaatatagattcctaagtcctggggataagtaatgaagccttatgcttgctatattttttctttctggaaatatatgaggtgtctgtggtgacagacgaaagaccattttacttgaacaaagagtttaaatacagacttga

SEQ ID NO: 1648 - DNA, 247 bp, Homo sapiens
tgggatatgtgtcgcttaaaggacattcttgctgctttgcagacagtggcttgaatgggtcaatggtttctcacgtgaaatcactcgaaagaatttcttggaaagaatggaatttaacacatatgtgtgggaggatttcaaatgatggaaagaaatagggttcaaaagagactgagctatatgctgcaaatcctgacactgggagtatacccgtacagtttgaagagggttaattcaatagaaaaat

SEQ ID NO: 1649 - DNA, 370 bp, Homo sapiens
tgtggactacgactgcgacatgacgacagacggggatgagtgtgatccatcctatcctcagatggaaggataaaaaacctatattcattacaattgatgagcaataactattatgagaaaacacaacatgccttcatggtaccagccctcgcaacaatacgcattcatttgatcgaactacgtccatagtgaggggcatgtattatagacccatagctaattcgtactcaatggggaaaatcgaaagcctttcctctagaataaggaacatgagaaagatgcccactttcatcccttttattcaacatagtattggaagtcctggctacaacaatcaaacaagagaaagtaagaaggagcatccaagttg

SEQ ID NO: 1650 - DNA, 356 bp, Homo sapiens
aggatgttagccaggaggatctcgaggacctgacctcatgattcacctgcctcggcctcccgaagtgctgggattatgggggtgagccaccacgcccagcccatttgtcctttttttaatcaaaagattttaaaagtacaagtactgccacagagtgcaggtctgcaaagtgtttcgactctacaaaagagtgtttgtattttaaaagttcaggaaccattttacggactaagacactgaggccctaggagatagggcttcttggccaagttgcagagccagctggggcccagggagtttaatccaagtggtgtgggtctccctttctctctgttcagggaagagcccccttcatc

SEQ ID NO: 1651 - DNA, 336 bp, Homo sapiens
  misc_feature (1)...(336): n = A,T,C or G
caggctcaccgattcacttcatccccgtcaccaggtacttgttagttaggtacacaaaattattcttgtggattcctgaaagtcttgtcacagtttgttatctgcagactctcacttatattcatctcaaagaaacgaacatgatcacctggtctagttcttccgacaagcctggacaatatagtaagatcccatatctataaaatgttttcaaaaaaattagctgggtgtgggggtgtgcacctgtggngcctgctattcaggaggctgaagtaggaggatcccttgagtccaacagttagaggctgtagtgaacagtgatggtgccactgcact

SEQ ID NO: 1652 - DNA, 342 bp, Homo sapiens
  misc_feature (1)...(342): n = A,T,C or G
tattgttagttattgttgttaatctcttactgtgcctaatttataaattaaacttaatcattggtatgtatgactaggacaagacatagtacggtatatataggatttattattatttttggttttaggtatccattttaggttttaggtatccactggggatcttggaatgttttccctgcagataagggggggactactgtacattactttctccatgtaaatattgcccatgtaaatactgctgagaccagtagtatattatgattctatttactttcttatatgctttgntttccttctcaagttaattgcctgattntatgtttatttctttttatt

SEQ ID NO: 1653 - DNA, 412 bp, Homo sapiens
cgttgctgtcggggctgttgtgagagctagaggcttggtagtaaaacaatgctagatgtggtgtctgctcctgagcttaaaaatagcttgagaaagacagtgatattatcagaaaagaatgtgcataatgaaaagttgaaacttttaaaaactcactcaaaactaagttttaaaaaagagccaccgcgcccagcctgagacgtgttttaaagactgacttttgtttcttttctagatataaatttagaaattgagaagtgtattttgaaaaggcataataagaaaaactatggtatataattattttaacttgccatatgaaaacctaaggcacagggaggtaacttgcctacaggtgcagccctaggaagtcagggagccaggattcactgtcagctgactgactccaaat

SEQ ID NO: 1654 - DNA, 336 bp, Homo sapiens
cggggacgggctcgttcctgccacactaacaattcgagaagccaaggccggaattattcttgagaccgagggaataggaccaatcctggccatcataggctgacttcatcgctccaacaggatgatttgcatattatccatgtgcaatggcacacacctggagtgcgacgtacttgggaggctgaggtgtgaggatcacttgagcccatgaggcacaggttacagtgagccaagatctcaccactgcactccagcctgggtgatagagcaaggtcctggctctaaaggaaattttaaagattgcccttggaattaagattaatatgtattccctgg

SEQ ID NO: 1655 - DNA, 334 bp, Homo sapiens
agctgtgacctgagggatgaattgcccattgattcatttattgattgaaacgccctttattgaaagtctgctatgtgccaagcattgctttaggcacagggtgtatatagtgttaaataaggtccctgctctctcagagcttacaatctgataaaagagaaatgcaatgagcaaataagtaaagaaaaggaaatatcaagcaggcaataacttctgctatgaaaatcaaactggggaatgtgataagaaatgcatagggggctatgctaggtggggtggtcaggaaaggcctttctgaataggtgaaatttggaggttaaaaaacatggatagg

SEQ ID NO: 1656 - DNA, 335 bp, Homo sapiens
aacatcactatcaattaacattttaattgatagtgatgttattaggcttttcatttaagtcatctacaaattgattgacaattgaactttatcatttgcttagttcactgctaaatcaaactgtttaatacttttttctaatagtaaaaacatactgaagattgagaagcactggtgtagaaaaaatatgtaaatatataaaatgtaatagcctggaaatcaatcagaaaattggaactgattccatttgtaagaacagaaacataaaataagttttaaacttataaaacttttattttaaaattactacaaacctcaatgtagggtataaaaga

SEQ ID NO: 1657 - DNA, 402 bp, Homo sapiens
tcgaattccgttgctgtcgtggacaaacattccttttcttttcaagatcctaaagctgatcatcaacgagctctccaacgtcatggaggctaatgccgctcgccaggccactcctgcagagtggagtcaagatgactccaatgatatgtgggaggaccaggaggaggaagaggaggaggaggaggatggtttatctggccaacttttatctgacattcttgctacaagtaaatatgaggaggattactacgaggatgatgaggaagatgaccctgatgccctgaaggatcctctctatcagattgatctgcaggcatatctcacagatttcctctgccagtttgctcaacagccctgctacataatgttttcaggccaccttaatgacaatgagaggcgagt

SEQ ID NO: 1658 - DNA, 399 bp, Homo sapiens
cgttgctgtcgcgagtagctgggattactttcgcccaccaccatacctggctaattttttgtatttttagtaaagacagggtttcatggagaaaccaatatagaattgttcaggctggtctcgaactcccaacctcgggtgattcacccaccttggcctcccaaagtgctgggattaaaggtgtgagccatcgtgcctggcctaaaaaatttttttttcttcatctgggtttttgctttgaaaacaagtttctccaaatttacagatttcctgatgatgttgggtctgaactcaccaacttgattaggtctttaggggccgagggactacccagctgcacaggtgactggatgggggaggtgtgggagggttttctccacactacgtccttctgcattg

SEQ ID NO: 1659 - DNA, 347 bp, Homo sapiens
aaaccctgtgaggctgagctgtgagggaaggtttggagtttgctatgggaaaggctgcagggtctataagaattgaaaaggggaggccaaggaggcttcagatccccttgacagtatttttaaaagatgcaggttaaaaaattgattttcttgttatttatattttgatacctaattgaacttctccaacttgacctcttttaaaaacaacaacaagaaaaaaaaaaaaaaaacccctgcttccccttattccttaacccgggaggggcctttcccaaaaaaaaaaactccagcccgatttctttgggaaaaaaaaatcctaaaacccttaaaaaaatacctttaag

SEQ ID NO: 1660 - DNA, 362 bp, Homo sapiens
aacaaaaaatatgaagacatactatgtgctgggaattattttaaaactaagaaaacaataaaggaaaaaaactagattgctcctttccctcattattataccacacgttttctgtcagtactacaggaatatataaaaggtctatcttccttgagggcaagattcaggtctaattaatcttttgatctttcttattactcagccagagttttgcacatggcagacataaggtaatagttggttgagtcatctatgtaaatgaatgctgcttagtgcctacaaaaatgggatttctcaaagatgattagagaggtaagtggtaaggaagatgttttctcataaaacccagcagctttgggaag

SEQ ID NO: 1661 - DNA, 176 bp, Homo sapiens
agcttgcatgagccaccgggcctggtcaagaataaggtcatttattgttgtataggcaataagtgtgaatcaaggatacttttaaaaactcataggtgagcccgggcatggtggctgaaatcagcctgcacaacccgtagtgagacaccatctctacaaattaaaattaaaacttt

SEQ ID NO: 1662 - DNA, 358 bp, Homo sapiens
  misc_feature (1)...(358): n = A,T,C or G
gaagatgtgagtgtgactcgtaaaggcaagagcatgtatattatgcaaaagcagcctgaaatattttattcacagacagacagacaatgcttgactccctgctaatctgaaatacttcgtggggagggccagggaaatcaaaacaaaatttcagaagtagaatgagctatttggtgtatgtctccaaggccagtaaataacaagaaggaaaaataaatttctttgctaacaacaagaaggagaaataaacttttttgctctaaaatattttccaattatctccacgacactggagggaaggactancnnnnnnnnnnnnnggagggagggagggaaaaannnnggaaaggaaaaagga

SEQ ID NO: 1663 - DNA, 400 bp, Homo sapiens
cgttgctgtcgggaacaacaaaacatttttcatagagatgttataaagattagagattatttggcactgtgtgtgacagattataaaggttcgatgaatgaaatctggcaaatttttagatatatgtattcaacgaattttttggtggaacacagataacataatcctgagaattaactctttgtacagacctcaagatgagcaaagctctatcactttcagaaccatgaccactctggtgattttgatttcagaatcttctttcattctggtaaaccccctttgccccaccaaatattgtatggaaatacattttttttttttttttttgaaacaaagcccccctcactttgttccccaaaaggaagggcaggggcgaaattttggttcaccgcccccc

SEQ ID NO: 1664 - DNA, 365 bp, Homo sapiens
  misc_feature (1)...(365): n = A,T,C or G
tacgtctgcgaatacgacagaagggggtggagattgcagtgagccgagattgtgccacttcactccagcctaggtgacacagcaagactccatctcaaaaaaaaaaaaaaaaattttttgtttttttttttccccttttccccccccaaaatataaaggctttttaacccctgttatactgctttattatttttaatagcattattgaaatgaggtttttttttgtctcccaaactggatttttttttaccacaatttttgttccttgaaccctaattttctgggcctaaggatatcttttttctttaacctccacaatttaaagggggttcacccacccttggtaaattttgattttatttgan

SEQ ID NO: 1665 - DNA, 328 bp, Homo sapiens
tactgaagaccagcgcgttccttacagcttttcacagactctcaccacaaacccagtgaccaggccaaacatctctcttaccgattacagggtgggtgtactctgctgggataataattatgttatccttctgaacctggctaacaacaagtgttaacaatcatagggaaatgggtttaggaaagctaactgggttgaggttagagaggccataaggttgtatgaggcagcacaggatgtggccacaggtcctgagtcacagagcaagacccggcctctaaaaacaaatttttttattttggagggtggaggatagggggtgggaggg

SEQ ID NO: 1666 - DNA, 320 bp, Homo sapiens
tcagatggagatggtggttgcacaacattgtggatgtactaaatgccactaaactgttcgctttcaaatggttgattttatgttatgtaaatttcacctcacattatttttaaaaatgatggcttttaaagaatatttactgacataggaaaattcacaccacatacctattattaaaactggacttacaatataatctcaattttgaaagattaaaaatgtacatgtgagtttgtgcatatatacatacatacagatatgcgcgcgcgcacacacacacacaccatatatatatatatatactcatcctcctccccaaa

SEQ ID NO: 1667 - DNA, 343 bp, Homo sapiens
  misc_feature (1)...(343): n = A,T,C or G
taaacaattatgttcctatactttacccatttaaaaattggtttgttggtctttttcttactgacttcaggagctgcttttatttctgtcccaatttttgcaccttctaactggctggaatagtttttactgatatgactatgtactgggaaaaccctaaaagaaactaatgattaaaccaactcaaacaataaagagttcagtaattggtagatgcaaattggtagatacagtagccttcatgtccacaaataatagacagttaaaagttatgatggtagagaaagccccatttcaatagcaaaagagaagataaaaatatttagaaataagttcaagaaan

SEQ ID NO: 1668 - DNA, 337 bp, Homo sapiens
taaacaattatgttcctatactttacccatttaaaaattggtttgttggtctttttcttactgacttcaggagctgcttttatttctgtcccaatttttgcaccttctaactggctggaatagtttttactgatatgactatgtactgggaaaaccctaaaagaaactaatgattaaaccaactcaaacaataaagagttcagtaattggtagatgcaaattggtagatacagtagccttcatgtccacaaataatagacagttaaaagttatgatggtagagaaagccccatttcaatagcaaaagagaagataaaaatatttagaaataagttca

SEQ ID NO: 1669 - DNA, 331 bp, Homo sapiens
gtttcattctgcatgtctttggtcatacaatagtctattctattattctataggcatttttctaacccactccaaatccattttgcagtgaggtacggatataaatacaaaggtaaacaatgtaattgtattacttgtgtatgcatgtatgttcttgcatgtgtgtattgagaggaatgtttgtctgactacctccatgtgccagtctgatcttctggagagaaaattgctgggaggctgtgacatgaaccagtgtggaggcaaattaatgacaagactgagaactggcatgaagagaaatccatgagatggacaagccacccttttaagt

SEQ ID NO: 1670 - DNA, 328 bp, Homo sapiens
  misc_feature (1)...(328): n = A,T,C or G
ggagcgtttgaacacaccacggaaatgatgccctgccctaagcccttggtttgggaaggatgagatcctattgttttttgtgtcccctctattatcttttgaacatgggttaactacatctacggcatttataacatgtggcaagcataagctcttgagtctgatgtttctgatgccatctactcttactgcctttggcacctcccagctactgacttcctcctgcttccccctggatccagatacgtggctgggaagagcccctggcctttgtagccagaggaggtggtgaccatgggcaacaggccactgtgctcctggatgcgtn

SEQ ID NO: 1671 - DNA, 384 bp, Homo sapiens
cgttgctgtcgaaaaatgtaaaggagctcagcctttttttcatacaatatttgttcatatcattaactccctcatatttatgtacataaattattggtgttaatgatatgaacaaatattgtatgaaaaaaagcgaaaatgcaaagtgctaattcttgggcagggtgggagaaggcaaatcacccaataaaggataaccctttaacattttatctaagaaaaaagaaggaagagaaaaatatttaccatctcagattagaagacaatataaatatatacatctatgttaatacttttgaaaataccagcaaaatagaaacatatgttttcctccagaaaaatagaaaaccttggaaattagtaaccatgtttccatggttatta

SEQ ID NO: 1672 - DNA, 348 bp, Homo sapiens
tggtacgtacctgtagtcccagctactcaggaggctgaggtgggagaattgcttgagcctaagaggtcgaggctgcagtgaggtgtggtcgcagcctgggtaacagagtgagatcctgtttgaaaaaaaaagagcaaagggcaaaaaactaagagttgcatatgaaagaaataccaatgaataccacggaaaagatgttcaattccattcataagatgagatatacacatttggtttataaaaagatagtggtcttcacctaaaaaaaaatagcaaaagttaaaagtctcagtatatactatatttgttgaagctgcttcagggaaagaatccagccttgatggtaga

SEQ ID NO: 1673 - DNA, 129 bp, Homo sapiens
tacggctgccatatgacgacagaaaggaggaggaagctgtttgtattccttgggctcgggtggctcatagtggccggtttttccgcgctcttttctctgtgtaccagatcgggataggtctctcttggg

SEQ ID NO: 1674 - DNA, 427 bp, Homo sapiens
  misc_feature (1)...(427): n = A,T,C or G
acacagctcttgtctttttgcggannnnttgttctaattcggcacgagcccacctttgccaaggtccagcggggcgtccaggacatgatgcgtaggcgttttgaggagcgcaatgttggccagatcaaaaccgtgtacccggcctcctaccgcttccgccaggagcgcagtgtccccaccttcaaggatggcgccaggaggtcagattaccagctcaccatcgagccactgctggagcaggaggctgacggagcagccccccagctcacgggctcgcgcctcctgcagcgacggcagatcttcagccagaagctggtggagcacgtcaaggagcaccacaaggccttcctggcctccctgagccccgccatggtggggccggaggaccagctgacccgctggcacccgcgcttcaacgtggatgaag

SEQ ID NO: 1675 - DNA, 255 bp, Homo sapiens
tgtcaccttattcacacatccagacacgtgatgtctgctacacatacctaccattttaacattcatgcttacacacacattcacatgcatacagagagaaaggagctctctctctttcatgggtttctcattgagaatcatgatgatatcagcacaggtctttggaggaaaggaaatttacattctatatctggaacctcaagaatgttccagccgtgtgtggtggctcacaccactgggtgtggtgggaggcca

SEQ ID NO: 1676 - DNA, 350 bp, Homo sapiens
gagtttgcagagacaggaagagagcagtctgggaggagggaacagggtgagcaaaagcagactatggaaggcagaggcataagacagtgcaataagttgtacaagggaagatgaggttgacacctgaccactgaatgtcaggttgaaaaggcccaacattcacccacacccacccatttccaaaacacacatgcacgcacacacatgtgcaaagaattccagcctcatgaaagagtggagcaggttcagtctcaccatagatcaatttcatggagatgtgtccagccatgtgtacatcttctcccattgaagaggctatggaggtaagaacctatatccataagccatgg

SEQ ID NO: 1677 - DNA, 388 bp, Homo sapiens
cgttgctgtcgctgaggtgcacagagcccaaaggcagagagaggggctgaaggatagacaggtgtgtagcatgggctaggtttacggtgagtgcttactaaatgctgtggaatgattgcatgagttccagaaggacccagactggtgagacagagaatgcagaattggctacactgggaaggagactccacctgacacagcaggagaaggataagcagatgtatagtgcttgggcagggccaggcaaaggggagatttgctcagaaaatgttgaatgaatgaatgcacaaatgcatgggaaggcaaaggtaagcatgagagagccacagagatgaaacaaacaaacaaaaaagacagaaatagggaattaaatagggccaggcacggt

SEQ ID NO: 1678 - DNA, 368 bp, Homo sapiens
ggctgtacaaagagacagaggctgttagctatggctgaagacagtggcaaaaaaaaaaagggggaaaaatttttaaagttttgtccaagggttcccttaaaaggggttgggaaacctcgggaataacccccttgttaaaaaccacgggggttggacaaacttttttccaacccttagtccttattccggttaaaaggccacccggggtaaaaaaagccacccccaaaaaaaaaccggtaaaatggtggaaaccccgggcaaaaaaggtttttcagggggttttaattttttggcaaaaacacaatttttgccctttgagggagaggaaaaaaaaaaattttttttggtccccattgtggaaacggggc

SEQ ID NO: 1679 - DNA, 429 bp, Homo sapiens
  misc_feature (1)...(429): n = A,T,C or G
gagagcattaacccannngttttgnagaggaacccatcgattcgaattccgttgctgtcgccaatgtgcccttcctggtggccctggcgctcctgagctccgtcctggggggccttgtcctggtccccggcctcctgcaggggccgctggcgctgaggaacatcactgacaccggcttcaagctgctgctgctgggtctggtcaccctcaacttcgtgggggccttcatgctggagagcgtgctagaccagtgcctccccgcctgcctgcgccgcctccggcccaagcgggcctccaagaagcgcttcaagcagctggaacgagagctggccgagcagccctggccaccgctgcccgccggccccctgaggtagtgcaggcccacgggcaccccagacactggaactccctgcctctgagccaccaact

SEQ ID NO: 1680 - DNA, 411 bp, Homo sapiens
ctcactcccgggcagcttagagcaaggggggagctgaacttcgaacaagatgagctggtggacggaggccagcggggccacatgcacaacggccttaactaccgtgaggtccgcgagttccgctccgaccaccatctggtacgtttttacttcctcacccgcgtgtactccgattacctccagaccatcttgaaagagctgcagtcgggcgagcacgcccccgacctggtcatcatgaattcctgcctctgggacatctccaggtatggtccgaactcctggagaagctacctggagaacctggagaacctgttccagtgcctgggccaggtgctgcccgagtcttgcctcctggtgtggaacacggccatgcctgtgggcgaggaagtcaccgggggttttcttccgccc

SEQ ID NO: 1681 - DNA, 405 bp, Homo sapiens
ggcacgaggaccgaccaggaggtcctctgttgagctggtgcgggcgaagctgccggctgtgggggccctgatggagcgtctcggtgtgctgtggacgctgctggtgtcccgctggttcatctgcctgtttgtggacatcttgcccgtggagacagtgcttcggatctgggactgtttgtttaacgaaggctcgaagattatcttccgggtggccctgaccttaattaagcagcaccaggagttgattttggaagccaccagcgttccagacatttgcgataagtttaagcagataaccaaagggagtttcgtgatggagtgtcacacgtttatgcagaaaatattttcagaacctggaagcttatccatggccaccggcgccaagctccgcaagagctgcagggg

SEQ ID NO: 1682 - DNA, 383 bp, Homo sapiens
cgttgctgtcggtttgaacccggtgaggcccatgtgggcaggccgtgggtaggcagggggcaccgcggggcctggcatatcccagcagcctggctctgtctcgagcaggggacaagacgttcgaggagtacctggatgagtattaccggctggactacgaggacatcatcgacgacctgccctgtcgcttcaagtaccgcacagtggtgccctgtgactttggcctcagcactgaggagatcctcgctgctgacgataaggagctgaaccggtggtgctccctaaagaagacctgcatgtacaggtcagagcaggaggagctgcgggacaagcgggcgtacagccagaaggcccagaactcatggaaaaagcggcaggtcttc

SEQ ID NO: 1683 - DNA, 419 bp, Homo sapiens
  misc_feature (1)...(419): n = A,T,C or G
cgttgctgtcggcgtagatgtttccacccactattctaacagctctatctatgaatatattgtacggcggggggccctggatttctctttctttgatttgatccgctactgtgtcagcgtttgcaatcagattgcatctcacctgcacatacatgtcttcagaatcaaggtctctacagctcattctaatcatcattaatgatgtaattggtatataggaacatcatgttttctgcaggaaagaaagtaacatattaaggagaatgggggtggataagaacaaatataatttataataatcaatgctggataacttttattctttattattggtaacacgccctaactatcctgtgtgagaatgggaatttcaagtcccatcttgcaaattggatatgttgtcatgcacggtttgagcn

SEQ ID NO: 1684 - DNA, 324 bp, Homo sapiens
tgggattagaggcgtgtgccaccatgcctggctaatttttgcatttttagtagagacaggatttcatcatgtttgctaggctggtctcaaactcctgccctcaggtgatccatctaccatggcctcccagagtgttgggattacaggtgtgagacaccgcacctggataacagtctgttgttgatcaccagtttttatataatttttcttttgaacacaagtatattataaaaatacttgaaaggagtattcaaaaattgattttgaataccgggttaaagattcaggtatggtcgttttcctacttcgaaatgcagaggaggg

SEQ ID NO: 1685 - DNA, 322 bp, Homo sapiens
attgtttttcttccagtttttctttttccaaaaaagggattcaagctggcctgcaaactcaaatggcttgtacatagttgagattaaggcaaatacacaagattgtatcctgtttttttcagctacattatacacaagtatcttcccttgtgataatgtagtttttataaatataagtttttaataactaatatttcattatgtgatacatcatgatttattattttaaaccatttctggattgtcttggtttcaacttgggaagggtctacaaaattctttaacaaagatctggatgcggcagactcagtggcttacgcct

SEQ ID NO: 1686 - DNA, 319 bp, Homo sapiens
tccctacataattgtgacttagaattatttagaagagaaatattatttatgagaagaaaaaataattaaagtcataatctttaaagcttaaattttaaaaagacaaagtttaacagcaaccattgagggtgaattatttattgttttgctctcttaacatacctttggggaatacaaattaaaataacaagaactatttaatttattgcttatctgactggcaaggataaaaatgaatgttaacatttatcagcaagcatgtgagaaagtaggctttctcatgcactacttatgtgaattaaaattggtaaaagttttc

SEQ ID NO: 1687 - DNA, 422 bp, Homo sapiens
  misc_feature (1)...(422): n = A,T,C or G
ggcacgaggtgaacacggccaaaggattgagtggcgaaaatggaagcaacagaagaaagaggagaaaaaaaaatggaaggatctcaagctgatgaaaaaactggagcggcagcgggcacaggaggaacaggcaaagcgcctggaagaggaggaggcagcggcagagaaggaggaccgcgggcggccctacacactgagcgtagccctgccgggctccatcctggacaatgctcagtcgccggagcttcgcacctacttggccggtcagattgccagagcctgtgccatcttctgtgtggatgagatcgtggtgtttgatgaggagggccaggatgccaagactgtggagggggaattcagaggagttgggaagaaggggcaggcgtgcgtacagctggcccggatcctgcagtacctggagn

SEQ ID NO: 1688 - DNA, 373 bp, Homo sapiens
cgttgctgtcgggctggtcttgaactcctgacctcaggtgatctgcccgcctcagcctcccacagtgctgggattacaggtatgagccaccacgcccggcccatttttttttttgacaacttttttttttggaaacggggttttgtcccttggccaaaatgggagggcgggggttggataaaagttaattgggcccggaaatcttttggcctaaccctccaaagtggtggaaactacgggtggccccattagccccggctagtttttcaatttttggaaaaaagacgggttttttttttttgaaaaggggttttttttttgccccaaaagtgggggggaaagccggggctaaccctattggaagcccccgccg

SEQ ID NO: 1689 - DNA, 343 bp, Homo sapiens
cattggtaggaggttatgcttttttctggtttttgttttactttcaacctaggttataagactgttattctatagctccaacttaaggtgcctttttaattccctacagttttatgggtgttatcagtgctggagaatcatgtagttaatcccattgctcttacaagtgtcagcttacttgtatcagcctccctacgcaaggacctatgcactggagccgtaggaggctcttcagttgggccccaaggataaggctactgatttgatactaaatgaatcagcagtggatgtagggattagctgattttaaaacaactcggctgggcacagtggctcacacctg

SEQ ID NO: 1690 - DNA, 406 bp, Homo sapiens
ggcacgaggagagtatggaacccttccccttcgctctcagccggaggccagctgcgtccagccgggctcggtcttctgaacaccgatttcaaatcaggtccccggggcccagcgtcacttagggaagtggtggcattttgtggttgctgctaaatcacggagagcagccttggcgctgccggtcccaacttgatccaaggagccttgagaaggagatgagattcagtaccaggggccggccgtggctcccatcctccggaatctgcaaaatggctacttcttcagaaataatggggagagggatggcaagaggccagagatcaaggccctcgagtattaacttgagcatttgggcacaaaatagacacttttggattttcccgtcttttccaacaccaaggatgag

SEQ ID NO: 1691 - DNA, 363 bp, Homo sapiens
  misc_feature (1)...(363): n = A,T,C or G
cagaagtttaattttttataatgatggatgaagacagtaatatctaccttgagtggcttgtcataagtattaaataataaaaactagcattaaaaatatctagcatacctagatatatgttatatgttatagttatatgtttaaaaatttgtgtttatttcatgccttatttatctttaagaaactttatagcctgatcggtgctgattctttttccaaaaagtcacgtaaaattttatcaggacaatgttttctgtaacaaccattatttcttgtctttctgccataagtggagaaaaaagatgtgaaggatcttgagttttcatactttctaaatgggctaagagtacagatgtcagaagn

SEQ ID NO: 1692 - DNA, 408 bp, Homo sapiens
cgttgctgtcggttcgctgggaggtatggatttcatttccattactaatgcctgcaattgctgataatagacgtgccccaggaatcgctgcatgggaaatggagcaagggtctccttctgtggcccagtctggaatgttagtggtgcaatctcgactcactgcaacctccgcctcccggattcaagagattctcctgcctcagcctcccaagtaactgggattacacgtacgcaccaccatgcccggcaaatttttgtatttttagtagagatagggtttcaacatattggccaggctggtctcaaactcgtgacctcaagtcatctgcccgcctcagcctcccaaaatgctgggattataggcgtgaaccatcacaccgggccattccaatcactcttcatttcctg

SEQ ID NO: 1693 - DNA, 443 bp, Homo sapiens
  misc_feature (1)...(443): n = A,T,C or G
tagacaattcnnttttgtgaaaatannacggccctcgaattcggcacgagggcacttctgccgctgcgcctgtttctgcaccgataacttgtacgtggcgcgctatgtgctgcacgtgcgcttccgaggcgagcaccagctgcgccgggactacggcccgatcctgcgcagccgaggctgtgttagcgccaaggacttccagcagctgttagcagagcttgagcaggaggtggagcggcggcagcggctggggcaggagtcatcagctaggaaagccctcatcgcgagttcctaccacccggcacggcctgaggtctacgactcactgcaggatgcagctctggcccccgagttcctggccgtgactgagtacagcgtgtccccagacgcagacctcaagggccttctccagcggctggagacagtatcggaggaaaagcgcc

SEQ ID NO: 1694 - DNA, 374 bp, Homo sapiens
ctatgttggaattatttggtaaactatctgaggctcatataatttagtatctttcattataagattattcttatatccatttctataagtttatattctaatttatgttatattccaggtagatgctgttttttttaaatgaatttgctctttgcatttaaatatttaaatatatcgggaaatagttgtgatcggatcccttatcttcatttttacaacctcatctttatcctacatggcggaccagcccttcttacaaggaagtcggttttttggcgtttaaagtcacaaagatctactgcgcaatcagcgcgggtcgaatacgccctcactttctacatttttcaatacaacaactccgtcggggtcatttg

SEQ ID NO: 1695 - DNA, 389 bp, Homo sapiens
cctgtctctgctaaaaatacaaaaattagctgggcatggtggcatgcatctgtagtcccagctactcaggaggctgaagcaggacaatcacttgaacccaggaggtggaggttggagtgagccgagattgcacaccactatactccagcctggcgacagagcgagactccgtctcaaaaaaaaaatcactctgtcaacagcaacaatacactttcttctcaatgttcattacaagctttgtgctgggccacaaaacaagtctcagtaaatgagatagaattaaaatcacgcagagggtattctctgtccgcagtggaaattaggactcggtaagatatctggagaaaatgctggccaggcacggtggctcacgcctgtaatcccagcag

SEQ ID NO: 1696 - DNA, 386 bp, Homo sapiens
tacggttgcgagatgacgacagacgggactgtgcacatggacacaagtgatcctcagtccttactccaaacccacatctttgagagacaggccacgctggagtgctgtggctcgatcacggctcactgcagcttcaaactccgcctcggcctccataattgctgggattacaggagcgtgccagtgtgtctggccttaacttgcatttttacataagacttctaaaaaaaaaggagaaaatcttcacaatcctgggatagacatggaattcttaggacatggaaagtaatagaatttcaaaattctgcttcctgaaagacactgttaagaaagtgaggaggcaaggcacagactaagaaaatattcacatcacacacatatttatt

SEQ ID NO: 1697 - DNA, 359 bp, Homo sapiens
  misc_feature (1)...(359): n = A,T,C or G
ccaccacgcccgctaattatgtatttgtagcacagacctaggtctgtcaagttgggcgaaatagaaccctcctttccttgttcccactcttgattcttttgaacatgggttacctcccttcgcgtcttttggaacagaaggggatcataagctcttgagtctctgttttctgctgtcatctactcttcctgcctctggcacctcccagctcctgacttcctcctgcttccccctggagccagagacgtggctgggaagagcccctggcctttgaagccagnggtggtggtgaccaggggcaacaagccactgtgctcctggatgcgtgggctggcaaatctctctcccattcgcctttg

SEQ ID NO: 1698 - DNA, 399 bp, Homo sapiens
cgttgctgtcgaaagcgttagtgaaatatgaagtgatgaggaatctgaaaatgaaattacaagtgttggtagagcttcaggtgatgacgatggaagtgaagatgatgaagaggaggatgaagatgaagaggaggatgaagatgaggatagtgaggatgatgataaaagtgacagtggccctgatcttgcaaggggtaaaggaaatatagaaactagttctgaagatgaagatgatacggcagatttgtttccagaagaatctggttttgagcatgcttggagagaattagataaagatgctcctcgtgctgatgagattacacgtcgattagcagtttgtaacatggactgggatagattaaaggcaaaagatttgctggctctgttcaattcatttaa

SEQ ID NO: 1699 - DNA, 388 bp, Homo sapiens
cgttgctgtcgctgcctccctctgggactaagtgcctggagagcctcctgggctcagtgcccccgccctgccctggcctccacagccttcgggagctcccagacccagtgctgagtgaggaggtggtggagggcattgctgctggcattgaggcagccctctgggacctgacacaaggcaccaatggccgagacaagaccaagtatcgcagcctgctgttcaacctgcgggaccccaggaacctggacttgtttctcaaagtggttcatggagatgtcaccccctacgacctggtgcggatgagctcgatgcagctggccccccaggagctggcccgctggcgggaccaggaggagaaaaggggaccgcagatgttcatggactgcag

SEQ ID NO: 1700 - DNA, 406 bp, Homo sapiens
  misc_feature (1)...(406): n = A,T,C or G
cccatcgattcgaattccgttgctgtcggaaggccgtggtgcagcgcgtcacccgggccagcgtcacagttggaggagagcagattagtgccattggaaggggcatatgtgtgttgctgggtatttccctggaggatacgcagaaggaactggaacacatggtccgaaagattctaaacctgcgtgtatttgaggatgagagtgggaagcactggtcgaagagtgtgatggacaaacagtacgagattctgtgtgtcagccagtttaccctccagtgtgtcctgaagggaaacaagcctgatttccacctagcaatgcccacggagcaggcagagggcttctacaacagcttcctggagcagctgcgtaaaacatacaggccggagcttatcaaagatggcaagtn

SEQ ID NO: 1701 - DNA, 347 bp, Homo sapiens
tatattaaccgactaaaagaggaaaataacaccatgggcattcctcccttttgcctggaaccatgttgactaaaatgtgtgcctattataagccaattgtgtcctcacttggcgtggtttcaaggtaacaaagatttgatcttatttaatctcttctcacatgtggtagacagaattcctaggtgacccacatggcttttgttccctggtgttactcgcatggtcatgttatgttgcaggacaaatgatattatgcagatgtaattaaaatgacttactaatcagttgaccttaggagagattatctagatggatctaacgttatctcacgagtactttaaaaacag

SEQ ID NO: 1702 - DNA, 327 bp, Homo sapiens
cgacagaaggagggttggtacccacctttgactgatggggaaagtgacgtttgaagcggtttatgcaaggtcctatagctcaggattcaaacccaggctctcttgctttaaagcccacctgggcttttaatactacaccaaagcctcctgttatctcgtttgtccttgaaccccccacagagaagctggaaaaataaaaaaaacaaggacgacacacaagcagaaagtgatgacctgctgtttgtagttgatcaaatgccatcgatgctgcttatgtgacgtggtgtccatgcaccatccatttttatttttcaggtcttagttacg

SEQ ID NO: 1703 - DNA, 329 bp, Homo sapiens
attgcactgattcatgtgaatggttcccctagtcatgcaccatgcggcctctgagaaaagcacaatattgaactctatcctagcctcccagagatttttaacctctacttcttccaagaatttttgttcctggacttagaagtcagggcagaggcaagccaggaaaggcagcaaaccagtttaacttcctcctctctctcgttgccttatatcttcttttgcccctttgctctctgccccaatcctcacaatagttaacagctactttacccaaatatcaaactagccagagaagctactgaacatgatcatttaaaaaaaaaaaaaaa

SEQ ID NO: 1704 - DNA, 330 bp, Homo sapiens
caacctgtagtatgggaaaaatatttgcaaaccatacgtatgataaagggttaatatccaaaatatgtcaggaactcacagagctcaatgacaaaaaaaaaaaaaaaaaaagggaaaacccttttttaaaaagggacaaagggtttgaaaaaatttttttccaaaaaaaaacaaaaaagggttaaggggcttttggaaagggtttccccctttataatttttaaaaaaatccaaattaaaaaaaaaacgggggccccccctccttcaattaaaaggggtttttgcccttaaaaaccccaaaaacaaccgggggggggggtttggaaaaag

SEQ ID NO: 1705 - DNA, 351 bp, Homo sapiens
ttatggcttgaagtttcatttgcctttttcttctctattatctaccacaaatctttaataatttggttgtaatctggatattagctttctttagaaaatattttatattccttaaatcttttttaacatgataaataataaacataaataggaataaagaggaatgaatttagttcctggctggagatgactaaataaattacaagtgataatattctttaagttattagtataatttaacaaactaaagacactcaaatgatgtttcaaaggttgttgaaaaaaactgataaatttacctagaaaaaaagttttgagataaagttaatggcgttgaagatgacctactgg

SEQ ID NO: 1706 - DNA, 346 bp, Homo sapiens
ttatggcttgaagggtcatttgcctttttcttctctattatctaccacaaatctttaataatttggttgtaatctggatattagctttctttagaaaatattttatattccttaaatcttttttaacatgataaataataaacataaataggaataaagaggaatgaatttagttcctggctggagatgactaaataaattacaagtgataatattctttaagttattagtataatttaacaaactaaagacactcaaatgatgtttcaaaggttggtgaaaaaaactgattaacttacctagaaaaaacgatatgagataacaggagtggcggttgtcatcacct

SEQ ID NO: 1707 - DNA, 296 bp, Homo sapiens
aagctattaggaatcagttaaatgttttgggattttgtctgagaatgggctaaaggagaatgtcccttttgccttctgaagtttccctgaaaatcactaataggaggcagataaatagtagaaaaggcataaaggtttctgcaatgtgtgtacactggagcccttagaacgaagacccagacacacgatgcgtgcagaagcttatctaccacatgaagtttacagaaagaatggggtcttggatcacaggaaaaaaaaaaaggttatgtgagaaaacgaccctggctagcaacagg

SEQ ID NO: 1708 - DNA, 351 bp, Homo sapiens
aaacagcaaatatataaaacatacaatataaacaacattgatgatatatgtatattatctacatataacccacaaaatagaaaaagaaaatttcagtacacaggaacaatattgttcacaaagtagttttcaataaactttaaagaaattatattatacaaaacacgttctttgataacaattataaattatgaataaaaatatagtaaaatatatattagaaactaaaactcctaaataatccttgaatcaaagaggaaatagaaatggaaattacaaaatttttagaatgaaatttttatgtactatataaaaaatgtgtgtaataaagccaatgtacattcatagacc

SEQ ID NO: 1709 - DNA, 353 bp, Homo sapiens
  misc_feature (1)...(353): n = A,T,C or G
ggctgcatgagctgttggcattcctaacccctgtgctgttcaaggttcaactgtactggattttcttgaaaattcagaagtgctggaaaccctgggcccggatttctatgtgacagcaattttggggctgagtggcttcatttagatggggcatgtgctccccatattctgctctccccttaacactgaggttgatgatagtgacctcaacatcaatgaggtagtgctgtttccatgtcatagaattaagaggaggttgaagnatttccccttctcactttcagcataactggaacaatggaacatccccttagggcaccatattttaagcaagaaaggaagagggcatcttt

SEQ ID NO: 1710 - DNA, 354 bp, Homo sapiens
  misc_feature (1)...(354): n = A,T,C or G
aggttttccataaacctagaaatatgactgaagaaaaatattccaaataacgattagggttggcattttagcttagtgagatcataagcatatttatttatacttagacataaagccagcaaataagatggggaaaggaaagaaggaataaaggaggacagagaacaatgaaggatgagtcagctagttttttaaaaagaaaagaacagaatgacgaagaaaaaggagcagaaagaaagacaaccaaatggggagaaagggaaacaaagctactagaaactatgaatgtatcacttgcctaccatgaacctataattgtgcttaatttggagacaaatccaagaaagggtacan

SEQ ID NO: 1711 - DNA, 337 bp, Homo sapiens
gagcaggggttaggcctggtgatgcccttctagtgaataaaatatggccacagtgatgggatgtcacttctgaggctggggcacatgaaacaccccacttccctcttgctgatgctctctcatgctctcacttactgtaagagaagccagctgccccatggagagacattcatggcaaagaactggagctggcctctggccaacagcccaagaggatggaatcctgccaacagccctgtgagtgagcttggaggtggatcattcccatgccgacctttatgtgactgcagctctggctcacaccttgactgcagccttggtaggaaaccctgatcct

SEQ ID NO: 1712 - DNA, 350 bp, Homo sapiens
agccagcacgggcagaagcttgaaagcccccaagtcacccctgggccagcagcagccacccagggcaggagggcaggtgcacagccagggtcagcgggtcagcaactcaccctggcctgcagcctacccagcacggaccatgtgcccagtagcagagctagaggaacaagcagaaaaatggccggcccccaaccagaggtcagagggaagggcaggagccgctgctgacctcgggggacacgggtggctgacctcgggggacgcgggcacacgctgtggggcttcgtgtcaggcacccatggggcctggggtctgctctgtgcaacagatactgtcgggctgcccatggg

SEQ ID NO: 1713 - DNA, 325 bp, Homo sapiens
gaccaccgccgccgaggagtcaggaagttcaagatggccgccgcggagacccagtcgctacgggagcagccagagatggaagatgctaattctgaaaagagtataaatgaagaaaatggagaagtatcagaagaccagtctcaaaataagcacagtcgtcacaaaaaaaagaagcataaacacagaagtaaacataagaaacataaacattcctcagaagaagacaaggataaaaaacataaacataagcataaacataagaaacacaaaagaaaagaggttattgatgcttctgataaagagggtatgtctccagcaaaaagaa

SEQ ID NO: 1714 - DNA, 384 bp, Homo sapiens
  misc_feature (1)...(384): n = A,T,C or G
cgttgctgtcggaaggccgtggtgcagcgcgtcacccgggccagcgtcacagttggaggagagcagattagtgccattggaaggggcatatgtgtgttgctgggtatttccctggaggatacgcacaaggaactggaacacatggtccgaaagattctaaacctgcgtgtatttgaggatgagagtgggaagcactggtcgaagagtgtgatggacaaacagtacgagattctgtgtgtcagccagtttaccctccagtgtgtcctgaagggaaacaagcctgatttccacctagcaatgcccacggagcaggcagagggcttctacaacagcttcctggagcagctgcgtaaaacatacaggccggagcttatcanagatggg

SEQ ID NO: 1715 - DNA, 123 bp, Homo sapiens
gtggatcaaagatttaaatataaaatgacaaaacttctaggagaaaacatacaagaaaatcccgatggcactggcagatatctcttagatgacagcaaaagcacaatttattaaagaacaaat

SEQ ID NO: 1716 - DNA, 349 bp, Homo sapiens
cagtatcgatcccattaaccaaatctagcgaacattattgagcaatgactatgtaccaggctctgtgttaggtgctgccacatatctgatgagtactactattactactattcatactaccattacgaagaataacatctaacattttattaaatcctcactggtagtgacagaaaccaggctaagtgctttacatacaatgtaagttttcacgaccacaaacctattaacatggcttatgggtgaggcctacctaatatgatatcgaaacgaaacagatcaacaaacaaagcatctagaattgtccactgttgccttattcaccatgagggcatcttagagctagaag

SEQ ID NO: 1717 - DNA, 340 bp, Homo sapiens
  misc_feature (1)...(340): n = A,T,C or G
gatgcgtgtgagctgacgccattttttttaggactgggtcacactctggcacgcaaactatgaggcggtgtcactatcatggttcactgcatcctcattataccatgagcatgcagccctcccccttatctggcgccacaggcgcatactaccatgctcagctaagtttctaaaagctattgtgtaaaaacaggatgtccctatgttgcccaggctggtctcagactcctgggttcaagtgatcagcctcccaaagagatgggattattgttgtgagccactatgcccaggtaattgcatctgctttagagagaagaggacaaacagatagatacactan

SEQ ID NO: 1718 - DNA, 325 bp, Homo sapiens
tcactcctgcccctctcctccaggcaatcaaactttggtttctgtcactatagattcgtctgcattttggggatatgtagatatattctgaaatactgtatattctgaaaatacactatatgattctgaagtcatacagtatattctttttttggtctggcatcttttactcagcataattattttagattcatccaggttgtaccttattgatagttcattcattttattgctgagtagtagtccattgtacagatacactacaatctgttcatccattcatctgttggttaacatttaggttggtgtatatattttggctatg

SEQ ID NO: 1719 - DNA, 355 bp, Homo sapiens
caacccacatatttattgccattaaaagtatagataaaagcaatttgacatcaaaagtatccaacattgcacaagtaactttgtttatccctcaagcaaatcctgatgacattgatcctacacctactcctactcctactcctactcctgataaaagtcataattctggagttaatatttctacgctggtattgtctgtgattgggtctgttgtaattgttaactttattttaagtaccaccatttgaaccttaacgaagaaaaaaatcttcaagtacacctagaagagagttttaaaaaaccaaacaatgtaagtaaaggatatttttgaatcttaagattcattccatgtggg

SEQ ID NO: 1720 - DNA, 331 bp, Homo sapiens
  misc_feature (1)...(331): n = A,T,C or G
aatcccaactacttgggaggctgaggcataagaatcgcttgatcccgggaagtggaggttgcagtcatcccaacncataccatttccctctaaatcttacatacttcatagaccttccctaaatctctcactacattctctttatttaccccaatactcatatctcttgaccgactgtaatctttatttcccctttttcactaatgccttaacccactccccttacctctatctacaccttgccccctcaaaacaaaacaaaaccctatttatgtgtggaaatttattctaatacttgggacctggttttaaacccaatttgttcttcctg

SEQ ID NO: 1721 - DNA, 233 bp, Homo sapiens
  misc_feature (1)...(233): n = A,T,C or G
tgaataacagaacttacttcatagggttgttataagaattgaatgaaaagtgcacagcatgacaaatagtaaacactcagtaaatgttagctattactattactagtctgacttaaactgttatcatcacatttgatgtgataaagaacacaaggttttctaaatagactcccatgggagctgggaggggagggtagtagatgagaatctgcttatttgttggaattttctcn

SEQ ID NO: 1722 - DNA, 204 bp, Homo sapiens
tgaataacagaacttacttcatagggttgttataagaattgaatgaaaagtgcacagcatgacaaatagtaaacactcagtaaatgttagctattactattactagtctgacttaaactgttatcatcacatttgatgtgataaagaacacaaggttttctaaatagactcccatgggagctgggaggggagggttgtacatgg

SEQ ID NO: 1723 - DNA, 338 bp, Homo sapiens
gagatctcagctctctgcagcctccacctcccaggtgcaagtgattctactgcctcagcctttggagtcactaggattacaggcgcccgccaccacacctggctaatttttgtatttttagtagagaagagcagggatcatgatgggctagatatgctggacttacgagcctgctgtctaaggctttcttaatgctaccattacaggggtgagccactgtatatggacggttgattgcggagtaaaataacgtatgcttgataagaataagatatacaacggagataacacctacttgatccgttcttgcccacctctaaggagctatattgaaccac

SEQ ID NO: 1724 - DNA, 326 bp, Homo sapiens
cggggacgtgtggggacttacgactgttagaccgccccgaaaaaagggctttacttgcgaattatgagatgctattacttaaaccgtccccaccatcatctgcaataaatgtctttactacaactacagcattcattctatcgttcaggctcacatctatagatgcgcaatgctctgaaggctgaggcaggagaattgcttgagcccaggaggcagaggttgcagtgtgccgagatcattccattgcgctccagtctggcgacagaacaagactctgtctcttaaaaagaaaaagaaagcaaaagttggggggcttattttataag

SEQ ID NO: 1725 - DNA, 300 bp, Homo sapiens
gttctgtcatcagtacttattaaggtgtcttgatgtagtaagcaagatagtttttacagtcctaggcttattacaagtttagtaaccccagtggactgagaaaatctttctcaatagctctggcaaaaaattcctctgggaaaatatgactgatgggagtttggatcatttgcccattcttgaaccaatcattgtatagttagccctctgtatataagggttccgcatctgtgtattccaccaatcgcggttgaacaaaattttggaaaacgctgggcgtggtggagcatccccccttct

SEQ ID NO: 1726 - DNA, 303 bp, Homo sapiens
  misc_feature (1)...(303): n = A,T,C or G
ttcgcattttcctgttaactaataatgctgagcatctttgcatgtggctattggctatttgtatatattctttggttaaagtctgtttaattcatttgcttctctcactttataaaattgggctatttatcttctaattattgaatcataagatttctttatatatgatgctctataaaagtatcttgtcacatatatatatcgntatttttctcctagtttgtgacctgcctttttatattattaatagtatcctttggggagcaaacattttaaattttgatagtctaatttatcattttt

SEQ ID NO: 1727 - DNA, 338 bp, Homo sapiens
atatagaatttcaatacatttactcaaaatgtggagtaagatagagttcaagatcttagattctagaaactatatagcaggaatatgaccataggctacttcctaacagctgtgtgatttgggtataataacttaatctctttaagcctcatttctccttctgaaaaactgaagaaataacacctactcgtctgagttcttaaaaggattaaatagcgtcgtgtgtcattttggattccaccagcagcacagtcagggacaagtatcctaacacaagaaatttgtcatggtggtaattccaggaaagtctggtggagacaggggaagtgagactgaga

SEQ ID NO: 1728 - DNA, 353 bp, Homo sapiens
cacaaaaaacaaattgtgaattaaaacaaattatataagtaaatgcatatttagcataagaaaagaaatcccctcaaaataccaaattttatctaatacatactacaatacataaaaataattttttttatttattaacttcatagcatacctttctaataccacattttctttcttttttttttttttttggaaacaaagttttctaaattttttggccaaggctgcaaaacaggggggggatttaagttaattgaaacctttcctttcagggtaaaaggaattttctggcctaagcctccaaaaaagttaaaataaggggggggcacaacattgccgggttatatttgtgt

SEQ ID NO: 1729 - DNA, 409 bp, Homo sapiens
cgttgctgtcgctgaggtttccttaatgttctttttgaatctttgagatacaggatctattacttgcatctgagagaattttgatcatgagtcttgtggagatctttttcatattactctctgaatgtattgggataaggtgtaagggcgctgtcttctactttaatctgataatatggggaattgtgttaatagatgttccaatgtttcctatgccttacatccctaggataaatccaactgtgccattttgttaaccttacaactgttagttaaacccctgtctgacaattaatatcacttatgtggtcatttttgctttttaaaacactttatttatttattgagacagggccttgctctgtcagctaggctggagcgaagtgggacttctctccccttaactgga

SEQ ID NO: 1730 - DNA, 292 bp, Homo sapiens
atttattatattttaacttgtgaaaggggttaaagtgatattgtcaaatttcatattattccatttttaaattttattaataaactttgatatgacttcacatttttataatacatttaacaaacagggtgaaaaaagagatagtatcttgatagtgctttattatttttctttaatcatatagactatattttcaaactttgtattttaatatttactatttaataaatgctatagttttcaaacatcttcttccattctattttttttaaactaacatttcttatttgcc

SEQ ID NO: 1731 - DNA, 339 bp, Homo sapiens
  misc_feature (1)...(339): n = A,T,C or G
gatggagaaatagagctcacctcttctgggtagagtagtggcaaagtcacattgtanaaaagcctgggaggtggaaaatttttttcatgattgtctttgtaaagtacaatctactacctacactttaacccaccaattcatcttttagaaatttatcctgtaagtggacttacaaatgtgaacaaaaataaatgaacaagggtatttgttactaaaatagtaatagcaaaagactggattaatctaaatgtccaataatagggttatttaacccaatttatttgtgcccatgcaatgcatagctatgtgcctggctttttttttttttttttggaaagg

SEQ ID NO: 1732 - DNA, 341 bp, Homo sapiens
agaggaagaagagaaagtggccacagggacagggcagcaagggtcaagcctgcagggggagagatggatgggtgagggctgtgagaaactcggggatacccatgcccagtgggaccaagggatggggctggagtgcagccacatgttccacctcccccaagtgccaggctgcattggactttgtcctggagccgtgcagagccatgggaggtttttgagcaggggctcggaggcctcagctcatggtttccatctggttccaggctgatggggaggcaccatcacagcccaggtcaggaaggtgagacactcataccaaacacttagaaaacagggccaga

SEQ ID NO: 1733 - DNA, 311 bp, Homo sapiens
atctcagaagaaaatgcaacccacatatttattgccattaaaagtatagataaaagcaatttgacatcaaaagtatccaacattgcacaagtaactttgtttatccctcaagcaaatcctgatgacattgatcctacacctactcctactcctactcctactcctgataaaagtcataattctggagttaatatttctacgctggtattgtctgtgattgggtctgttgtaattgctaactttattttaagtaccaccatttgaaccttaacgaagaaaaaaatcttcaagtagacctagaagagagtttt

SEQ ID NO: 1734 - DNA, 343 bp, Homo sapiens
acaaagaaaatgaaaagcaaaattgccctgtaaacaattacattaaatgcaaatgtcttaaaatacagctattggcataacaaattattaaacataaccaagtatatgctgtctacagtaaactcacttcaatataaagcagtttgaaagtaaagggatggaaaaagatacattatgcagatattaattgaaaggaggaatggctatgttaacattagataaagtatatttcaaagcaaagaaaatattttataatgataaaagaatcaggccgagtgcagtggctcatgcctgtaatcccagcacttatggaggccgaggcaggtggataacctgagatcag

SEQ ID NO: 1735 - DNA, 346 bp, Homo sapiens
  misc_feature (1)...(346): n = A,T,C or G
agaggatgaagagaaagtggtcacagggacagggcagcaagggtcaagcctgcagggggagagatggatgggtgagggctgttagaaactaggggatacccatgcccagtgggaccaagggatggggctggagtgcacccacatgttccaactcccccaagtgccaggctgcattggactttgtcctggagccgtgcagagccatgggaggattttgagcaggggctcggaggcctcagctcatggtttccatctggttccaggctgatggggaggcaccatcacagcccaggtcaggaaggtgagacactcataccaaacacttagaanacagggccagaggccg

SEQ ID NO: 1736 - DNA, 390 bp, Homo sapiens
tctatccagttatccatccatccatctctccctccctccttccctccctccatctctcccttcatccatccatagctctatcctatcacccatccatctatccctttatccaatcatccagccatccatccctctatccaatcatctatccatccatccttctatccaatcatccatccatctatcccctattcaccctccctccatgcaatcaaccatctatccattcccatttatctaacaaatcatccatccacccacacacccaccatccacccattcatccaccaatccatccacccatgcaccatcacttaacagagcgccaagcactgtgccacatggggatacagatcttgctaaactgttaagcttcatgaaggcaacggc

SEQ ID NO: 1737 - DNA, 420 bp, Homo sapiens
cgttgctgtcgggggaatatgtcctgtttctgtttcaagagctaccaggagccatgaggcagctgccctacttcatccggccagctgtccccaagagagatgtggagcgttattcacacaaatatcagatgtcaggtccgattgacaatgccatcgattggaaccctgattggcggcgtctaccccggtagctaaagatccgagtgcggaagctacagaaggaacggattacaattctgctccccaagaggccccctaagaccacagaagataaggaggaaacaatacagaaactagagaccctggagaagaaggaagaagaagtaacttcagaggaggatgaggagaaagaagaagaacaacacaacgaagaggaggaagaagaagagtttgatgaagaagaacctgaagaggaaactg

SEQ ID NO: 1738 - DNA, 397 bp, Homo sapiens
ggcacgaggaggacgaggacgtcaaggataactgggatgacgatgatgatgaaaaaaaaagaggaagcagaagtaaaaccagaggtaaaaatttcagaacagaaaaaaatagccgagaagataaaagagaaagaacggcaacagaagaaaaggcaagaagaaattaaaaagaggttagaagaacccgaagaacctaaagtgctaacaccagaagaacaattagcagataaactgcggctaaagaaattacaggaagagtcagacctcgaattagcaaaggaaacttttggtgttaataatgcagtttatggaatagatgctatgaacccatcttcaagagatgactttacagagtttggaaagttactaaaagataaaattacacaatatgaaaagg

SEQ ID NO: 1739 - DNA, 429 bp, Homo sapiens
  misc_feature (1)...(429): n = A,T,C or G
ggcacgagccatcttcaagagatgactttacagagtttggaaagctactaaaagataaaattacacaatatgaaaagtcactatattatgccagttttttggaagtcttagttcgagatgtgtgtatttcattggaaattgatgacttgaaaaaaattaccaattcactgactgtgctttgcagtgaaaaacagaagcaagaaaagcaaagcaaagccaaaaagaagaagaaaggtgtggttcctggagggggattaaaagccaccatgaaagatgatctggcagattatggggggtatgatggaggatatgtacaagactatgaagacttcatgtgacattttatcttttcttggngtcatctttatggtgcccacaatcccttgaacatgtagcacaacttccttttctttcagttctgccaaatgn

SEQ ID NO: 1740 - DNA, 372 bp, Homo sapiens
  misc_feature (1)...(372): n = A,T,C or G
tatacgacagaaggggtaatcccaaaaacttgggaggctgagataggagtatcacttgagcacagttccagaccactctggacaacagagcaagacccccagaaaatgaaaattaaaaaatggcaaagtcagaatacatgttgaatttaaaagactacgttttggaggtgtagctgatcccaagctgttatgagcaaccccctaaggactgcagatggcctggatccaggttctgagttagagcagcagacagtctagagctatagccacacagagggctggggattgcgcagcagggtctagacacgaccctgccacagtaggtcgtctccctctgttggcacaaacagacatgacattgttggcagagtn

SEQ ID NO: 1741 - DNA, 341 bp, Homo sapiens
aattagaataattgggaaatgattggaaaatagaaatcttaagctagaaaacatgtaactaataaaagtagtttcattaaaacaaaataaataaaagaataactaggaatatcctaatcaagtaagtaatggagagtatacaaaataattagtaaaaggagggatatatccaagatagtaaaaactttaaatattttgaaaaattttatgctacatatttgatatttttaagaaaacataatttaccaaaactgaccccagaataaatataaagtttcattctgttaacacaataaagaaaatgtacaaaaggctatctttcagaaatgtaccaagtccag

SEQ ID NO: 1742 - DNA, 394 bp, Homo sapiens
  misc_feature (1)...(394): n = A,T,C or G
cctgaatggagtgaacaagagggccatgcagatatcttggaggaaagacattcccgggcaaggaaacagcaagtgcaaaggccacaaggtgggattgagtgtggtgtgtttgaaagctgaactgtcaccagtgcaggagcagagtgggcaaggcagagcaggggagtgatccaggcaaaggtacatttcaggaaaaattgacagtaaggagttcggattttatgctacatgtgttggaaaaaccaatgaagggttttcagctaggtaacatgatccgatttactccctttaaagattggccgggcacagtggcacatacctgtaatcccagcactttgggaggccaaggcaagaggattgtttgagctcaggagttcaagatcagcctgaccan

SEQ ID NO: 1743 - DNA, 385 bp, Homo sapiens
cctgaatggagtgaacaagagggccatgcacatatcttggaggaaagacattcccgggcaaggaaacagcaagtgcaaaggccacaaggtgggattgagtgtggtgtgtttgaaagctgaactgtcaccagtgcaggagcagagtgggcaaggcagagcaggggagtgatccaggcaaaggtacatttcaggaaaaattgacagtaaggagttcggattttatgctacatgtgttggaaaaaccaatgaagggttttcagctaggtaacatgatccgatttactccctttatagattggccgggcacagtggcacatacctgtaatcccagcactttgggaggccaaggcaagaggattgtttgagctcacgagttcaagatcaa

SEQ ID NO: 1744 - DNA, 420 bp, Homo sapiens
ggcacgagattgcatatagtcctgatgggaaatacctagccagtggagccatagatggaatcatcaatatttttgatattgcaactggaaaacttctgcataccctggaaggccatgccatgcccattcgctccttgaccttttccccggactcccagctccttgtcactgcttcagatgatggctacatcaagatctatgatgtacaacatgccaatttggctggcacgctgagcggccatgcctcctgggtgctgaacgttgcattctgtcctgatgacactcactttgtttccagttcgtctgacaaaagtgtaaaagtttgggatgttggaacgaggacttgtgttcacaccttctttgatcaccaggatcaggtctggggaggaaaatacaatggaaatggttcaaaaatttggg

SEQ ID NO: 1745 - DNA, 389 bp, Homo sapiens
acgctgatgccgcatctgtatacacccgtggaactagcatcaagattaagataatgaacatgttcatcaccctcaaaagttccccgatgcccctttgaaatcaccctttccatcctttccccaccctcctgcccggcaaccactgatctgctttccgtcactatagatgaattagcttagattttctagagtgatgcttatgtggaattgtacagcatatattctcatattatctcgcttctttcactcagcataatcctgtcaacattattccatttgtgccatgtagcatcacttgatcgtattgttgagtaggattccattttatggctagatcacaatttgtttctccatttgtctattgatgggcatctgggtcatttttcact

SEQ ID NO: 1746 - DNA, 176 bp, Homo sapiens
  misc_feature (1)...(176): n = A,T,C or G
tgggtgaataacagaacttacttcatagggttggtataagaattgaatgaaaagtgcacagcatgacaaatagtanacactcagtaaatggtagctattactattactagtctgacttaaactggtatcatcacatttgatgtgataaagaaacacagggttttcaaaatagaatg

SEQ ID NO: 1747 - DNA, 359 bp, Homo sapiens
gagtctcactctgttgcccaggctggagtgcaatggtgtgatctctgctcactgcaacctccgcagcctgggttcacgccattctcctgcctcagcctaccaagtagttgggagaataggcgacttccaccactctcgcatttgtgataggactttttaaaggactcggagtccaaatactaaaaacaggatggccggaatctccagacctgatgatcttgctgcctttatatttaaagtgccaggactatacgccgaataatgggtggcccccttgaagacgcaaccctgtcctttgcttatgaattgggtgttgtaccgattctcctgatatccctataggcaattgtcggaaatag

SEQ ID NO: 1748 - DNA, 328 bp, Homo sapiens
cagggtgaatctgccttaggttccctgccttcagacagtattctcctgcggcaacactttgctgacaactattcttgaaaatacggggattggtattttcatggtggttttcatggggctgagaacttagaagataatgactgcttccttcatctggggatgggatttaaatgtaatggagcactcactgttttcttgagaaggtgggagatactagcttccttataaagataaaggggtgcgagaggcaggattttaggaactcaaatctatgtgggaaccggcgagcatgaattcttttttctttcccaatcccaatcttttattg

SEQ ID NO: 1749 - DNA, 347 bp, Homo sapiens
tatatgaaccgactaaaagaggaaaataacaccatgggcattcctcccttttgcctggaaccatgttgactaaaatgtgtgcctattataagccaattgtgtcctcacttggcgtggtttcaaggtaacaaagatttgatcttatttaatctcttctcacatgtggtagacagaattcctaggtgacccacatggcttttgttccctggtgttactcgcatggtcatgttatgttgcaggacaaatgatattatgcagatgtaattaaaatgacttactaatcaggtgaccttaagagagattatctagatggatctaacgttatctcacgagtactttaaaaacag

SEQ ID NO: 1750 - DNA, 297 bp, Homo sapiens
  misc_feature (1)...(297): n = A,T,C or G
tgcatacatgttttaaaacatcatactgtatcccataagtttgtacaattactatatgtcaattaaagataaaatacaactttaaaaaattgtccaaaatgaaacatacagaaaatactttaagaaaaagcaaaagagcatcaatgagtcagtgagttatggaacaacttcaagacacctaatatacacgtaatttaagtccctgaagaaaaggggtgtataaaaatatttgaaaaaataatggatgaaattttaaatatttggtaaaaaccataaaactgtagatctaagaagctn

SEQ ID NO: 1751 - DNA, 328 bp, Homo sapiens
aaatctttacctagctttgttttctaagccttcatcagaatctaggctttttctagtctgctcctccaaattattctacctgctgccccattatacccagtttcaaagctgcttccacatgttcaggtatttctcgttgtcagtaacaccctacttcttggtaccaattttccagaattccatgaactctaccaccagttaacccaatggtaactggaacatattccagctaagaaattcagcagtttattaaaaattaatggatctaggccaggcatggtggctcacacctgtaatcccaacacattgggaggctgagatgagggga

SEQ ID NO: 1752 - DNA, 350 bp, Homo sapiens
gaatgcaaaaagagaaaggccgaccatgcggtggaaggtgcggaggaaggggaggggagtactcatcattgtggagggccccaaagcatcggaatgggacggcatgcacataatgaatccttctccctggcgaatctaatgctgttacgtctccatgtcaggaaagccatttaagaaacaaggatatgccggtcgcggaggatcactctttttattcctgcactttggtaggcctttgttctcacattgacttatgtcatgtattacttacctttctggccaccctcgtttcaagaccctattaattttacttctccatcccttttctttggagtctcccccccgctgcg

SEQ ID NO: 1753 - DNA, 338 bp, Homo sapiens
tcatcactttttaatataatgttaattaatttgcataattatcatgacaagtacaagtgactttcacaggtaaagaagcagacacaactgattttgactctggtaagcaacaccactcaaggagagggttggaagcagaagtgcctgagtctcctatggagtagcctgtcagtgactgggcagcccttgggcagtccatgtgttatgggggaaggaagagcattaatgaatccaatagtttggttaattctaactgaacagtattcttttaaaatttacatgtcccttattttaagaataatatgtttattatatatatcttgaaataatatgtttca

SEQ ID NO: 1754 - DNA, 397 bp, Homo sapiens
ggcacgaggctgggggtgctttatcctttctgccaagtgccgtgacacttctgaaaaatctccaggagcaagtgatggctgtaactgcacaagtgaaatcactgacacaaaaagttcaagctggggcctatcctacagaaaaggggctcagcttcttggaagagaaagaccagctgctgctcatgtaccttatggatttgacccacctcattctggacaaagcctcaggaggatctcttcagggacatgatgcagttttgagactgggagagattcgaacggttttggaaaagcttcgtcccttggaccaaaagctgaagtatcaaattgacaagctgatcaagactgcagtgacaggcagccttagtgagaatgacccacttctgtttaaagcccg

SEQ ID NO: 1755 - DNA, 316 bp, Homo sapiens
ttgtggctatagagttactttgtatgattttgatcatttaaatttatcgatacttattttatgacacagtgtttggtctatcctggaaaacattccatatttgcttgagaaaaaaatctatatattcctgtgttgttggatggagtggttattcaaaatacaactctgtgctaactttctgtttagtttttctaccaattattgagataatgcattgaagtctccaaatattattgttgatttgtgtttctcttttcaatttagcttctgtttgtatttggggaatctattactatgtgatatgatctatatatgt

SEQ ID NO: 1756 - DNA, 156 bp, Homo sapiens
tggtaccgcttggaaaggacaagagaagggatctgttgcgggaagacgaccgagagctactggtgctacaagacgaaacaccgtctctgctgagagtacacgaattataggtgcttgtgggcacgcaccagtgatcgctactggtgcggaagggag

SEQ ID NO: 1757 - DNA, 325 bp, Homo sapiens
gcctcagcccccaagtagctgggatgacaggtgcatgccaccacgctggctaatttttatattttttgtggagacagggttttgccatgttgcccaggctggtggtgaactcctggattcaacctttctgcctgccttgggctcccaaagtgctgggattacagatgtgagccattgcgcctggccaaggcttgatattattaagtcaatgcttctcatattggcctaatttatagatcaatgcaattataatcagaaacctagcaggtctgtgggggggcgtaaattgacatggtgggactaaaaggtatgtgaaaatgcaaag

SEQ ID NO: 1758 - DNA, 379 bp, Homo sapiens
cgttgctgtcgctttgattgtcattctcctgggaagcccagtctcagtccctcccccaacactgtccacactgcccctccccactgtttatttattgcacggatctaagttattctccccagccagagcccgagctcctgctccctgggaaaagtggcgtatggccctgagctgggctttatattttatatctgcaaataaatcacattttatcttatatttagggaaagccggagagcaacaacaaaaaatgtttaagccgggcgcggtggctcacatctgtaatcccagcactttgggagtccaaggagggggatcgcttgagtccaggagtttgagaccagcctggacaacatggtgaaaccccatctctacaaaa

SEQ ID NO: 1759 - DNA, 112 bp, Homo sapiens
tacggttcgagaagaacaataaacggttcggcttgcttaatacgactgaacggttcggcttcgacatgaacccccaaagggctggttgtctgaataagcttgaacggtacgg

SEQ ID NO: 1760 - DNA, 380 bp, Homo sapiens
  misc_feature (1)...(380): n = A,T,C or G
cgttgctgtcgctgtcacagacacataactggaaatgtgattttattctcctggatggacaattgtgatggattttttgggttccgggcttcaggctttgcaatctcatcttctttgcccttcctcttgtcataatggaagaggtgctgctaatttgggttccatcctttcctgctttcagagactgtcctgtgatttcctaaaacatttccattagtttgtttgaattttctgattttcttcccttagggccctccacaggcctctgtgctagtgccttgaatgatggcaagtgtacaaaaaaaattttttttctttttaagacgtttttgttctgtcacccaaggtgagtgcaatggcgngatctngggtcactgcan

SEQ ID NO: 1761 - DNA, 160 bp, Homo sapiens
gaacctcctgctccagcctctgcctcctccattttgatgtctagaatcaggggatccaggatcatcaccaaggtcattttcccagacagatgtgctgaggctgtagaaagtgctttttatttggttgggagcctgtgcataaatgcgagaggggctgcac

SEQ ID NO: 1762 - DNA, 343 bp, Homo sapiens
  misc_feature (1)...(343): n = A,T,C or G
ttattgggtatatgcaatgtgtgtgtccatgtgtacctctcccacagtccctcaaatgtggagggtagaacttccaataaactttctctccactgtgcttacatagcccactgcacatgtcttctacattgtattatagttatttgttcacagattttttttttaccactaaactatgatcttgtcaagggtggagacgtctttatctttataatccaagtgcctaggacatttcctgacacatggtaggagttaaataccttggttgaattaatatacaaataaaacagggagcattgtttaagaatatgaattattggctgggtgcggnggctcatgcctg

SEQ ID NO: 1763 - DNA, 246 bp, Homo sapiens
ttcctgtgacattggacaactgaaaggctcttatgcaggaagacatatgcttagcacatgtgccagaagcactactaccaggtctttatgctagaatcatgaaaatgtatattctcgcagaaagtctacgcaagtgcttattgcaactatacttataattgtcacagatggaagcaaccaaatgtccgacaattcgtaaatagataaaccagctgcactgtcattggtggctcacgctagcacttt

SEQ ID NO: 1764 - DNA, 369 bp, Homo sapiens
catacctaatagctcaacagtgtatagccaattactaacaatgtcatttttgtaagctaatgaggattcctgacaaaccactttatactttcatcatcactccctctcccaattcatcatttttttctttagcagctccagtctctcctttgttctccagagcacttcccaaggtaacttagaagtattttctgggctgcagtccttaactttaggccaaataaaccctctacctatagtaattttggctcaatttctttctttaggccaacactcctaaaaatcacaaatgaagctgaatgggcattcactttctgctttcatcttcttggggataagaactataaaatccttggccgggcgcggtgg

SEQ ID NO: 1765 - DNA, 347 bp, Homo sapiens
  misc_feature (1)...(347): n = A,T,C or G
catatttttctaagttgcttaaaatttaattacttaaaattacttaaaattctaaattacttaaaaatttaattcatgtcaatgtgatcaaacagatcaatttctttcattgtcctggttcaattatgttaacattattttcccaggaagataatgttcctaggaacatatagatttaaaaaaccagcaaataggaaaaaatgtaggttgtagacttcttttccaggtagtctttgaaaaatgaacagaattcagtattgaaaatatctatggttctaactttgtcactgtgtaaccttaaataaattacttagcatctctgagtctttactttctaaactattaan

SEQ ID NO: 1766 - DNA, 317 bp, Homo sapiens
ccagcctgggtgacacagtgagactccatctcaaaaaaataaaaaacaaaaaaaccagagaataccaagaaagtgcatatctatatatacatacatatgtgtatatatttgcataaataaatccagaagatgcctaagaaacttatttaggaatgtgggagggcatggtgcatttagatgaatagggaggaacagttagagagagttcacactttgtatgttttcatatggttaggtttgaaaccatgtgaatgtattacttactcagaaattaaattaggccaggcgcggtggctcacgcctgtaatcccagcact

SEQ ID NO: 1767 - DNA, 386 bp, Homo sapiens
cgttgctgtcgataaggggcaggtcttggccctagaggattgagatgtttttctaaatcttagaactatttttggataaattatatattttccttcctagtagaagtgttactgcctgtaactagctcaaaataccaatgcagtttctgcattctgggttttggttttcctttttttttttttttttggagtttggctttggccccccaggtgggggggcagggggggaatttaatttaatgggaaaatttggcctccggggtaaaaagaattccccgccctaaccccccggagaaccgggaataacggggcccccccccccccctaagtaaattttggttttttaaaaaaaaagggggtttaacattgtggcccggggggttttt

SEQ ID NO: 1768 - DNA, 347 bp, Homo sapiens
aatagtttggttaattctaactgaacagtattcttttaaaatttacatgtcccttattttaagaataatatgtttattatatatatcttgaaataatatgtttcaataaattgaaaataaaacacatacatacacacatacacacacacacacacacacacacaatgcaccacctggaaaatcactataaatattcaatcattctatttccataatgctctcttatgcaaggaccacttacaacacaataatttttaaacacagtccatggttttagctaatactgcatatatcacataaaaataggacaatatgcccttataatgagttattcttggtataactca

SEQ ID NO: 1769 - DNA, 354 bp, Homo sapiens
agtacattatgaccactgggtttatttcagaaatgcaaggctgatgtttgaaattctccatattaagtaagtaaaaggggggaggcacagatatcaattctccccaaattgatacttagagtcaaagtaatcccaaccacattcccaacagttgttgaagaaatataggtggattctctattatttttctgtattgagctctaaatagatacagaaaaaaaattgataaaattcaatacttatttgttatttaaaaataatcatgacacaccccgaacagaaaggaacctttttaatttgaaaaagcttatttacaaatacctatctaaccattgaaaatttcttcttctttct

SEQ ID NO: 1770 - DNA, 381 bp, Homo sapiens
tctacagctgagagaagacactgaagggatgggaaacgctgcgacctcttacagaggaggaaagttcatggacttctagcttctagaactgtgatacaataaactcctgctgcttatctactcctctgcagtattttgtcatggcagccctagcaaactactatagtgactgtgggggttaggatgacaccaagcatcaaatgccactccctgttccaacagtgagaccattccacagcccctgaatgacaagacaggccttcaaactcaagactacctggctaaggtagaagtactttagtcacaccacttctgaactttcttgcctacctgcagggcaagaatttttaccatttttaaatgtggacactgaagctcaca

SEQ ID NO: 1771 - DNA, 403 bp, Homo sapiens
ggcacgaggtccctgaaagaaagttctgtatggattcctttcatgcggtgaaggaacaacaacaatattcaacttcaccttggcgtgtgagggtcgtcgcgttttataacactatccctgtagaaagattagtgaaatgtattggaagaagtaatggaaacgtgaatcttcctgggctcgcgagtggatcttatttggagtcctcaccttcttaaatctgatgtttgtttgaaatcacggctgaatttccatatataggacagaaagaaagaaccccaattttttaaagaaagctccccccccccccgcccgcttttttcctgaacccacttggtctcccgttataaggcggccacaataaaaggcaacaattttcttttagtcttttgacgccattatattt

SEQ ID NO: 1772 - DNA, 331 bp, Homo sapiens
  misc_feature (1)...(331): n = A,T,C or G
cctgtctctgctaaaaatacaaaaattagctgggcatggtggcatgcatctgtagtcccagctactcaggaggctgaggcaggacaatcacttgaacccaggaggtggaggttggagtgagccgagattgcacaccactatactccagcctggcgacagagcgagactccgtctcaaaaaaaaaatcactctgtcaacagcaacaatacactttcttctcaatgttcattacaagctttgtgctgggccacaaaacaagtctcagtaaatgagatagaattaaaatcacgcanagtgtattctctgtccgcagtggaaattaggactcggn

SEQ ID NO: 1773 - DNA, 373 bp, Homo sapiens
agtctgggtgacagtgagacctcttcacaaaaaaaaaaaaggggggggggccggacccatgggctcacccctggaaacccaaccttttgggaggcccggggctggcgattcaaagggacggaaaacaaaacccttctggttaaccggggaaaaccctgtgttttcttaaaatgccaaaaaaaaaatttacccgggcgggggggaaagcccctgttaccccaatttctttgaagggtggggccagaaaatgggggaaaccccggagggggaatttggttgaaactaaaaatgccccactggactccaccctggggaaaaaaaacaagaaaaatttctaaaaaaaaaatatccctttgaaccccctcttttttga

SEQ ID NO: 1774 - DNA, 351 bp, Homo sapiens
tctcccaaagtgctgggattataggtgtgagtcactgttcccagccgagacactgtctcataaaaagaaaagaaaagaaaaaaaaaaaaagggtggggggcaggggttcacaccggtatccccacctttttggggggcaaaggcggtcaaacccccgggggcggggagtgaaaaactcctctgcccaacgggcaaaaacgttgtcctttataaggacctaaaaaataacccgggttggtacgaacctctttgaagcggcactaacgtgcatcctctgaggattcgtagtattcgcctacacttcctcacacgatgtaatggattcacttccttctctaacatagtagaccg

SEQ ID NO: 1775 - DNA, 335 bp, Homo sapiens
cctataactgcttttgtggtggctcattggttttaatacgatgagtttctattctaatttgtctcaataaatttttaaaataataaaattgacccattggttattttttgagtgcattgtttaatttccatgtatgtgtaaagtatatgacactgttgttgatttccagatccatacctttgatacttgatataatctccatcttcttaaatttttttaagacttgatctgtggcctaatgtatgatctattctggagaatgttccatgtgtagttgaaaagaatgtgtaccctacaattgttgaatgaaatggtctgtaaatgtctttaaggtc

SEQ ID NO: 1776 - DNA, 429 bp, Homo sapiens
gtctttttgcaggatccgccgccatgaaggccgtggtgcagcgcgtcacccgggccagcgtcacagttggaggagagcagattagtgccattggaaggggcatatgtgtgttgctgggtatttccctggaggatacgcagaaggaactggaacacatggtccgaaagattctaaacctgcgtgtatttgaggatgagagtgggaagcactggtcgaagagtgtgatggacaaacagtacgagattctgtgtgtcagccagtttaccctccagtgtgtcctgaagggaaacaagcctgatttccacctagcaatgcccacggagcaggcagagggcttctacaacagcttcctggagcagctgcgtaaaacatacaggccggagcttatcaaagatggcaagtttggggcctacatgcaggtgcacattc

SEQ ID NO: 1777 - DNA, 365 bp, Homo sapiens
cgggagtgtgggggagggcagtgaatatgataggataccactcctgtgatcaggttactaatcagttgatttttttagttaatcaaaagggaggttatcctaactggaattgatcaaaccaggtaatctctttaaaagaagatgaatgtcagagtgatggtctcctcctggccttgaagacaacgcaaactgagagaaaggggccactcagcaaggatctgagggcaacctataggaacagacagcctactgcacaagaagcaagggtatcagtcatagcacaacaaggaaatttctgccaaaaaccagtgagcctggaagagaatcctgaacttcagacgagactgcaaccttggattgatttt

SEQ ID NO: 1778 - DNA, 373 bp, Homo sapiens
cgttgctgtcggaactgggcaacatagtgacacccagtgtctattacaaacaaaacaaaaacagatgaaggcctgcatttgcctgtaggctatagtttgttgatccctaactagtaaatggtattcacatataaccacatggactttgcactgcacagaaaaagtcagtttggggagaatttcagacttacatgtgaaggacagatgtcaatttttatttttattttatttttgagacagagtctcgctctgttgcccaggctggagtgcagtggcatgatcttggctcactgcaacctctgccccctgggttcaagcaattcttgtgtctcagcctcctgagtagctgggattacaggcgtgcaccaccacg

SEQ ID NO: 1779 - DNA, 408 bp, Homo sapiens
gggcgacagagtgagactttgtcacgaaagaaagaaaaagaataaagaaagaaagagagagagagagagaaagaaagagagagagagaaagaacgacagaaagaaagaaagaaagaaagaaagaaagaaagaaagagagaaaagaaaagaacgagaaaggaaagaaggaaagaaagagaaagaaaggaacaaagaggaaggaagggagggagagagagaaggagagaaagaggaagggaaggagagagggaacgcaggaagaatgcattactgcccacaggttatctctttatgcacgacttatgcctagacgcgctccggtatacaaacggcaaagctctaaaccggcgggctcgtacttaccacccttatctccccccaaccgcattgcagccttcctaccctgcg

SEQ ID NO: 1780 - DNA, 351 bp, Homo sapiens
gacatcagaattgtgtatcttgatttacaaagaaaaaaaacaaaagatactctcttttttaataaacttaaaatgttcacatggcaagtgttcactcagcaaagtacttcagaacaaatttcagaatcaccagagaaccagtgaacaaagagggtgcagagataaggagaggcattagatgataaagcaatcagttctccaaggagacataacagtcctcactgtgtatgcaccaaacaacacaacaccccaatacatgaggcaaactgatgaactgcaaggagaaatggccaattcagatactgactggattagaacaaatacccaaaacttggggagtagtgctcaata

SEQ ID NO: 1781 - DNA, 380 bp, Homo sapiens
  misc_feature (1)...(380): n = A,T,C or G
cgttgctgtcgcgcgagatggattccgggtgctggttgttcggcggcgagttcgaggactcggtgttcgaggagaggccggagcggcggtcatgaccgcccgcgtcctactgcgccaagctctgcgagccgcagtggttttatgacgatccttaacttctcgcttacgtttcacttccgcctctttcgcttcttcttccgcccccttttccttcttctcatcccaccattctgatcgttctccctgcgatctctgctcgctcttcatctctgcgctcctcgtacttttccttcctccatctcttctctctccctcgtctgccgccgccttactactcttnctagttctgtcagctcttctttctgtctcgcctctctttc

SEQ ID NO: 1782 - DNA, 347 bp, Homo sapiens
  misc_feature (1)...(347): n = A,T,C or G
tctttttctactacacacacatttttagcaccaacctctgtaatacatcttaacagattccacatcacattgtactgaattcatattttctctacttctttgtaagtatttttgcctgttcacatagaatattaatgtaaattgattctttagtcactttaaacttggcattgactcttctaagagacaacatctgagcagtcttctacttagacagccattcaataatagtgggatccttcaacaccccattgtcacattagacagatcatcaaggccaaaaagtaacaaattctgaacttaaacttgacacgtgaccaatggcacttaatagatatatatagaan

SEQ ID NO: 1783 - DNA, 336 bp, Homo sapiens
ttttgagggatttttaaagaaaaactactaaatttgatgattgataacatctgtgcagtgggctgggcttgcagggagggttatgagacatggtgaggccagagtggtcaagtgactgaatattgttgagagtgagaagtgagaagggcaggagaccagaactgaggctgagagtgcagctataatgataaagacgggccaggcacagtggcttacacctgtaatcgcactctgggaggccgaggtgggagaattgcttgagtccagtaattcaggaccagcctgggcaatatagtgagaccccatctctacaaaaaatttaaaaattagccaggg

SEQ ID NO: 1784 - DNA, 330 bp, Homo sapiens
gttgagactgcaatgagccgagatcatgccattccactctaacccgggtgacagaatgagaacttgtctcaaaaaaataaaaaaataaaaaaaaaatgtatcaaccaaagtcatggagaaccaaaccaagttttgtctacaaccatgattcttacagtttttggtttcaggactctttgcattttgaaaaataactgaacacccagaagcttttgtttatatgaattttatctatcagtatttactatattagaaattcaagtgaggaaaaatttaaatatgtatcaattcatttaacagaacatgagtaaactcattacatgtaaacat

SEQ ID NO: 1785 - DNA, 332 bp, Homo sapiens
ctatacaatctctgttgcaactcttcaactctccctttgtagcatgaaaacagtgatatgccatatgtaattaataaacatggctgtgtttcaataaaactttatttgcaagaacaggcagctggtcacagttgatctcctagccatagttttccaaccttatttatctcccaaaggagatttcctttgggagataaataaggttagatttgatcttgagggtgagaaacttatgataggattaatatcctcataaaagaagaaagaggccaggtgaggtggctcatacctgtaatcccagcacttttgggagggcggaggtgggcaaatct

SEQ ID NO: 1786 - DNA, 335 bp, Homo sapiens
gtctccatataaatcgagtatgatttccagaaggaaagaaaacaataaataggacaaatgtgatatacaaagtagagacaataatgggaaatttttcagaatcagtcattggtggagcatgacacgagtgattaagtagggtagtggtcactaaatccaacaaaaataaatacctccacttcatgatcttcatcattatcatcataatcattgttatcatcttaagtaccatccacaaatatcacaaagctctagaatactattgttattgtactggaaatgtaaaactctaaggtaattaaaacataaatcaaatgtaaataatatattttcag

SEQ ID NO: 1787 - DNA, 319 bp, Homo sapiens
gggcgatcttttcggattatcttccatgctgtggcagaataaaaccaaaacattggctcttcctggaccttcaacctaccagcttttgaactgaaccaccattggctctcctgggtctcatgccttcaaattcagactgccaatatcatactgaatgggcaaaagctggaagcattccctttgaaaaccagcacaagacaaggatgtcctctcttaccactcctattcaacgtaatattggaagttctggccagggaaatcaggcaggagaaagaaataaaggtattcgaacaggaagagaggaagtcatattgtctct

SEQ ID NO: 1788 - DNA, 333 bp, Homo sapiens
cttcctttgaaatgactttcagtttcccactgggatagattatatcaagtctgcttggtaaatgccatgctggaaagcaaaagtgtcctttcaaagtatggaatacactgaataagataagccgcggatcccgcagtatgaggttttaaatttattccaaaagaagaaatagaggggtacatttacaagcaaagtacagggccaggcacgggggctcacacctgtaatcccagcactttgggaggtcgacgcgggcggatcacgaggacagatcaagaccatccctgcttactcagaaaactcccgctctactaaagatacataaacctagcg

SEQ ID NO: 1789 - DNA, 316 bp, Homo sapiens
attaaaataagaaaataattctgatattatattttactctaattttaaagccttttttcatattaagtgtttttgttgattcaaaattagaaaatatatctatctctaatacttaatacccattccctaacatggcatttgttcattcaattgaaaacatttagcaaaatgcctcttcgacatctatgggatcatttaaaaaatgttttgggggacttaattataattctcctctaagcttttgaagcttagctaagactattacctattctcttgggttttgctaccaccatgtgctagtatgtgacagatgttt

SEQ ID NO: 1790 - DNA, 338 bp, Homo sapiens
  misc_feature (1)...(338): n = A,T,C or G
tatgtactacggttgcgacatgacgacagacggtgatgtatgtggaccccccacctctcatcagcgtggacaggcatgcgctatttgcgatcctcgttatgccctggctataactaggatgcccactctctcgcactcctattggacatagcaccggttggcctacattttatcgatcaggatcgagaggaggtgagggatgttcttataggaagagagtaagtcaaactatctttctctgcaagtggtatgattgtataactatgaaatcccatagtctccgcccaaaagatccatgagctgatgaacctcagcaaagttttaggatacaaaatcan

SEQ ID NO: 1791 - DNA, 326 bp, Homo sapiens
cagggctagcgagcctacctctagaaccttcttgccagggtcaacttctgagattgacagttgtctttcatgttctagcatgaaagttatctggttggtttgctcttattctagctttgtggggacttgtataatctaattttttgaataggtaatacattcacatggttcaaaatttaaaaaataacaacaaaaaggttatgctgagaaaagtctctcttactctcccgttccctatctacccagcttctaccacctccctaaaagtattagtttcttatacagtatatgtgactagaatttctttatataaaaagaagcaaatg

SEQ ID NO: 1792 - DNA, 244 bp, Homo sapiens
gcagtgggggagaggccatgtaagtacctggggaagatccaggcagaacagtttgcacaaaggccctgagatgacacctcgcttggtgtgctggagggcagtaaggggaccagagtggctggagtggggtgaataagaaagcagaaggccgggcgtggtggctcacgctcatgcctgtaatcccagcactttaagaggctgaggctggcggatcacaaggtcaggagattgagaccatcctggc

SEQ ID NO: 1793 - DNA, 336 bp, Homo sapiens
aaaaagatgacctaaaactgtccttatccccaggtggtgtgattttcaacatagagaacaaacctaagcattctacaaactattataactgataagtgatattagcaacatttaaaaattaataatttacatctccactggcaattaccaattagagattatgatagaatatgatagaaaaataattccatttataatagcaaggaaaactataaagaatctatgtataaatgtaacaaaaatgtttaagacacatttgttggaaaaatcacaaagtattcataatatacataatgaataaaacacattaataaagaaataagtacaaagtccatg

SEQ ID NO: 1794 - DNA, 325 bp, Homo sapiens
  misc_feature (1)...(325): n = A,T,C or G
tgacactctattatagtctaggctgtttacatactaccatcagggacgaggatgtctgacgtaagaaattaccacgaagtatttattcccagaaggcaaagacctcaccatgagtgggaactactgtacgcagtagcgaaaaaacattaaggacacagaatatacatatatgtctatatttatatatatgcacacatttatacacacatacatatatacaaaacattccctgtttttaaatatatgtatgtacatatacacacacatatatgtatgcgtgtgtgtatactgaaactatatttgcataagnttatatattatatcc

SEQ ID NO: 1795 - DNA, 328 bp, Homo sapiens
gccaagatcgagccactgcactccagcctgagcaacagagtaagactctgtctcaaaaaaattttccttttaaaggaaataattatttatttatttttgagatgagatctcactccgtcgcccaggctggtcttgaactcctggcctcaagcaatcctcccacctcagcctctcaaagtgttttggattacaggtgtgagccactgctcctggcaaactcgtaatttttggtagaacaattggggtacttctgatatgaaaacaaagctgggccaacttcttcacttcgatatagtcatatttatccaattttcgttcatgctgtggg

SEQ ID NO: 1796 - DNA, 352 bp, Homo sapiens
tactatattataagagtagacaaaaagagacaaaaatctctgctctcaaagagcttaaatgctggtgggagctaagaagcagataaaaaaaggcgaaataatggttacttcaatttagcatataccaagtgctaggtggtctcctgagtatctactaggtattacttaatttaatcctcccaacaactccatgaggaaagtattactattgtgcatatggggaaactgagacacagagagattaagttacctgctgaagatcatgcagctcctgaaggcagaaccaagatccaaacctgatggtcttggtacaaagtccatggtctaattaagagctacacttcaggccagg

SEQ ID NO: 1797 - DNA, 353 bp, Homo sapiens
tatgttttcttccagatgttttatagggtaggtcttatatctaggtctttgattcactttgagtttttatatataatgggagatcacatgctgtttttgaaaacgagttaaagtggtaaacaatcaggagtttaaaaatatgcatctatctttggttttactgacaatcatgtgatattttgttaaacataccatttaatagaaagaaaacaaactttaacctctaatgaggctgatattctcaatatttactttaaaaatgtgataagcttagagttattagaaaaggcctttgacatttttgtttttacaaatcaactgctttcaataaagacttgaataaatgaagcctt

SEQ ID NO: 1798 - DNA, 362 bp, Homo sapiens
tatgttaaaatgctcttacacagagcccagactttccaagggttattctttgtgtgagtgtgtgagtgtgagtgtgcgtgtgtgctcacaaatagaggcccagcacgcttatactacaaagagagaggttactcgggggaatatactaacaccggaaagggttactaatttaaatgctgagggtacagacctacctcaccttgtgaagcgcactatctctcgactgggcacggttacatacgtctgcagttctagcactttacgaggctcgagcctggtggatcacgatgtcaggagttcgagaccagcctgtgcaatatgggcaaacccccgtctctactattcatacttatattagctgg

SEQ ID NO: 1799 - DNA, 372 bp, Homo sapiens
  misc_feature (1)...(372): n = A,T,C or G
aagattgttgtatcgccatatctatttctactttgtaacagtagcttttttttgccacgtttaatgactgatcacaaagtgagatatttaaatatatatatacacacacacatatatgcatatatgtgtgcgcttgtgtgtgtgcgtctatatgatagatacttgccacatgtttaatgactgatcagaaagtgagattttaaaatatacatatatatacacatgtgtgtgctttgagagcggtgtgtatatatatatgatagatacttagctgatcttcacaccacaacattaatctgcccaccatgaacagaagcactgctatcaagtatcagccttcttgtataataacaggaaattcagaacattgan

SEQ ID NO: 1800 - DNA, 278 bp, Homo sapiens
gttggttttgtttttacgatagtttatcacaatctgtcagtgttttaaatgcatgtatcttttgatcccgcagtttctataacattctctcttacggatatacccatacttgtggtcacatataccatatttcatccaatctaaaacactctaaatagtacaaagtgctattattttatgtaccattaagaaaacaaaacctaccgctttaactatgacacagtcctttcatatcacttagaattgcgtcttatactcattaagaccgctcctagctg

SEQ ID NO: 1801 - DNA, 357 bp, Homo sapiens
  misc_feature (1)...(357): n = A,T,C or G
agacaaggtttcaccatgttggccaggctggtctccaacttctggctcaagtgatccacccacctcaacctcccaaagtgctgggtttacaggtgtgagccaccatgcccagccctacaaccaactggtttttgacaaaggcaacagtaatacacagtggggcaaggacattctcttcagtaaatcgtgttgggaaaactggataaactgcagaacaaaattagacccttatctctcaccatatacaaaaatcatcttgggttataaaaaaaacaggacctgaaactatgaaactactaggagaaacaagaaaagctatgtgacattgatctgcaccatgattttgtatctatgacn

SEQ ID NO: 1802 - DNA, 351 bp, Homo sapiens
cccccttcacggctttgcacaagtggccttttataaaattaccacttgctgtttgccattctgcctctgagggactgaatttccaaccccccatgggatggtataaggagatggggactttggggggtaactaggtttataagaggccataaggggcttggcctagaggctcacacctgtaatcccagcactttgggaggccaacacaggaggatcacttgggcccagtagctcaagaccagcctgggtaacacagggagatcctgtctcaaatcaaaataattaaattgttaaaaagataagaatatgatagaacagggcatgaaggtggggcccccgtgatggccttag

SEQ ID NO: 1803 - DNA, 410 bp, Homo sapiens
ggcacgaggtcggcggaaagtttggctgcgcgggttcccccgaagttcagagtgaagacatttccacctggacacctgaccatgtgcctgccctgagcagcgaggcccaccaggcatctctgttgtgggcagcagggccaggtcctggtctgtggaccctcggcagttggcaggctccctctgcagtggggtctgggcctcggccccaccatgtcgagcctcggcggtggctcccaggatgccggcggcagtagcagcagcagcaccaatggcagcggtggcagtggcagcagtggcccaaaggcaggagcagcagacaagagtgcagtggtggctgccgccgcaccagcctcagtggcagatgacacaccaccccccgagcgtcggaacaagagcggtatcatcagtga

SEQ ID NO: 1804 - DNA, 406 bp, Homo sapiens
  misc_feature (1)...(406): n = A,T,C or G
cgttgctgtcggcgatccttcccggcaactttttcgagaaaaatgcccaaattcaaggcggcccgtggggtggggggtcaggaaaaacatgcgcccctggccgatcagatcctggctgggaatgcggtgcgggcgggggtccgggagaagcggcggggtcgcgggacaggagaagcggaggaagagtatgtggggccccggctgagccgacggattttgcagcaagcacggcagcaacaggaggaactcgaggccgagcatgggactggggacaagcccgcggcgccgcgggaacgcaccacgcggctgggtccaagaatgcctcaggatggatcanatgacgaggacgaggagtggcccaccctggagaaggctgccacaatgacagcagcgggccatcatgcag

SEQ ID NO: 1805 - DNA, 329 bp, Homo sapiens
gagcacacctgcacacactggaacacacctatgcacacctgcacacacctgcaacgctcatcgtccctatgtgacctggagcaagttatctaacctcttggtgcctgagcttccttatctgtaaggtgatagtgatgatgcccccccccagagagctgtcatgagaatgaaatgaggtgacgcccttacaggtgtgtaagggcgatacctggcacactgtggggccatctgagggttgctcatcatcccccatcccgggagcttgccaccgtgcccaggtgtgcagcccacagacagctgcagctgccatggtcacaggagatcacaag

SEQ ID NO: 1806 - DNA, 321 bp, Homo sapiens
aaatacaacagagaagctcaacagagccaaaaattgtttctttgaaaatactagtaaaactgactaacctctgatgtgactgaccagtaacaaattagtgatgcaaaaataacccatgaggaatgaaaagaggaacctaattacagatgccacagagattaaaaagatagaagaatacaatgaactttatgccaataaatcttaaaagttagatgaaatgaactcctgaaaagaaaacttaaactgtcccaagtagaaacagaaaactttgaatattcctaaaactacttcagaaaatgaatcagtagttaaaaatctacc

SEQ ID NO: 1807 - DNA, 399 bp, Homo sapiens
ggcacgagaagaactcttgctcacatcatctaagagattgcacctgctgacctagagattccggcctgtgctcctgtgctgctgagcagggcaaccagtagcaccatgtctgtgactggcgggaagatggcaccgtccctcacccaggagatcctcagccacctgggcctggccagcaagactgcagcgtgggggaccctgggcaccctcaggaccttcttgaacttcagcgtggacaaggatgcgcagaggctactgagggccattactggccaaggcgtggaccgcagtgccattgtggacgtgctgaccaaccggagcagagagcataggcagctcatctcacgaaacttccaggagcgcacccaacaggacctgatgaagtctctacaggcagcg

SEQ ID NO: 1808 - DNA, 129 bp, Homo sapiens
  misc_feature (1)...(129): n = A,T,C or G
gcttccggtgggcttggtactgatcgcnccaggctctacagagtgacggtttaattcctgggtcctggagctacttctgtggttccatgtctggatctgtatgttccagtaagcgtactcggtaatctg

SEQ ID NO: 1809 - DNA, 387 bp, Homo sapiens
cacctcaattaaaaagcagatactgctagtttggatgaaaaagcaagatacaactatatactgcctataagaaatagactttaaatataaaaacacaaataggtacaataagaatatggaagaagatattccatgttaacaataaaagaaagctgaggtggctatattactcaaagtagactgcagtgcaaagaatattataaagaataaaggtcattataatgataaaaggtcgattttatcattatgttctctgactacaatgtaattaaattagaaatcaataacatgagattatctgaaaaatacttggggaaaaaatacacacgtctaagtaacccatgggtcaaataagcaatcaaaaggaagattaggaaatattctgaa

SEQ ID NO: 1810 - DNA, 388 bp, Homo sapiens
cctctgaaacttgggttgcccatccaaagagggggtgacaatcctgtcttgccaagactgctgtgaggattcagcttataagtcataaaatgtagtcggctggctgggcacagtggcttacacctataatcccagcactttgggaggccaaggcaggaggatcactagagcccaagagtgtgacaacatcgtgtgccatggagagagaccccatctattcaaaatacaaaactatatgtgcgcgggggggcgtacctctggattcccatcctcgcgaggcgctgacgcgagctaatgtgatcagcccggacggctaagcgttcaccgacgcgagtatgcgccactgcttatccctctgtgcaacagaaaacgacttttttgaaagata

SEQ ID NO: 1811 - DNA, 345 bp, Homo sapiens
aaaaatccaagttcatttgggatcttgtttacttatcatctagataaaaagtttgcaaactatagccaaagggcccaatcccacctgccacctgattttataaataaagttttactggagcataactgcacctatttgttttgttttgttttttgagtcggagtctcgctgtgttgcccaggctggagtgcagtggcacgatctcagctcactgcaagctccgcctcttgggttcacaccattctcctgcctcagcctcccgagtaggtgggactacaggcgcccgccaccacgcccggctaattttttgtatttttagtaaaaatggggtttcaccgtgttagc

SEQ ID NO: 1812 - DNA, 283 bp, Homo sapiens
tttacctcattggttatatgtactcctaggtatggtggggtttttcttgtgcatgacgcaagtattaaattaaacctctcatgttatactttatcttattccttacaatagctcagacagtagatcatctctgtttccactcaaatgcaccagaagcctgagtgtgtattttatttatttatttaaaaactgaatatcactctgttacccatgctggagtgtggaggggccatcataaattattgcaacctttaacacttagtcttaaaggattctcccacct

SEQ ID NO: 1813 - DNA, 331 bp, Homo sapiens
caaatatcctcagtaaagtactggcaaacaaaattcaacagcacattaaaagatttatatgccgtgatcaagagaaatttatccctgggttacaacagtggttcagcatatataaatcagttaatgtgatatatcacattcacagattaaaagcaaaaaacacatatatacctcaatagatacagaaaaatattttttaaactcaacatccattaatgataaataatatttaacaaaataggtataaaaaacttacctcaatactaacataataattaatagacaaagaagcctgaaaactttttctcaaggacccagtagaaaacaagga

SEQ ID NO: 1814 - DNA, 335 bp, Homo sapiens
  misc_feature (1)...(335): n = A,T,C or G
tttccgtttgttgagacttgttctatagcacaaaatatagtctaatttggaaaatgttctgtgtgcatttgaaaaggatacacatttgaaaaagacatgctattgttgaatagagtgtcctatcattatctgttaggttaagttgttgacaatgttatttcagggttctttgtagatttgcttatttctctttctagntccatttgtttttgcctaacatatttaaaattctgttattagtgattaattttttaggacttttatgtccttttgatgaaatgactcactgcttattagtaaatgaccttcgtgaactcttggtttcattcttgggg

SEQ ID NO: 1815 - DNA, 331 bp, Homo sapiens
catttacatatacttgaaaatcattgctattaatttctaatttattttctctttttgtcagataatacacttcgtaggatttgaaaccttttccgtttgttgagacttgttctatagcacaaaatatagtctaatttggaaaatgttctgtgtgcatttgaaaaggatacacatttgaaaaagacatgctattgttgaatagagtgtcctatcattatctgttaggttaaagcgctgacaatgttatttcagggttctttgtagattagcttatttctctttctagctccatttgcttttgcctaacatatgtaaaattctgatattagag

SEQ ID NO: 1816 - DNA, 322 bp, Homo sapiens
  misc_feature (1)...(322): n = A,T,C or G
tctatccaggtatccatccatccatctctccctccctccttccctccctccatctctcccttcatccatccatagctctatcctatcacccatccatctatccctttatccaatcatccagccatccatccctctatccaatcatctatccatccatccttctatccaatcatccatccatctatcccctattcaccctccctccatgcaatcaaccatctatccattcccatttatctaacaaatcatgcatncacccacacacccaacattcacccattcattcaacaatccattcacccattcaccattacttaacaga

SEQ ID NO: 1817 - DNA, 298 bp, Homo sapiens
gtacacacacatgcatatacatatgtatgtgtgcgcatatgcatacacgtccatacacgtgtacatatatgtgcatgtgtgcgtgcatacacacatgtacatacatatggatacatacacatgtatacatatacatgcatgcaggcacatgtatacatgcatacatacacatgtatttaagccagagattgcacactggtgccctaagagctggatattggcccagatgtgttttctttggtctacattaaattttttttttcctttttgagacagaatcttgtcctgtcacccaggc

SEQ ID NO: 1818 - DNA, 345 bp, Homo sapiens
gggcaggtcttttccttcttcctccacttcccctaccctccaccgtccgggagccgccgccaccgccgccgaggagtcaggaagttcaagatggccgccgcggagacccagtcgctacgggagcagccagagatggaagatgctaattctgaaaagagtataaatgaagaaaatggagaagtatcagaagaccagtctcaaaataagcacagtcgtcacaaaaaaaagaagcataaacacagaagtaaacataagaaacataaacattcctcagaagaagacaaggataaaaaacataaacataagcataaacataagaaacacaaaagaaaagaggttattgat

SEQ ID NO: 1819 - DNA, 350 bp, Homo sapiens
tgatttctcaccctcccaaacacttaccttatttttttctctatatctgcatggttttgtttccttaatatattccaggaaatttatttttgggttggcctactggagaagttatgatgaatagaaaagtgtgaagaagaaccttctattctcctcacagtatacggcaaagagcgtgcaattgcccccacaatatcattgtggaaaggtcatattactgagactagctagtaacacattagcttacagaattctcattcttacgctataatattaccttcctcatcaaacttacctgaccgcatgcttgatgttggctgattaagacataacacgctggtatttaccaa

SEQ ID NO: 1820 - DNA, 269 bp, Homo sapiens
cagcctcctacagacttttaagtgccatgagtctcaggcaattaaaactagaagtacttctacgtatgatctattaggtcctaaaagactacttctatattcatttgttccaaagttcagagtgacacatactatccaagagacagctaatggtttttgttctggcacatgacttgttcatatctacacaagttcacaaattgaaaattcttaagagtttctggccaggcacagcggctcatgtctataattccaacaccttgtgagga

SEQ ID NO: 1821 - DNA, 390 bp, Homo sapiens
cgttgctgtcgctgctttgtagagaatagaatataggaaagcaagaatggaaacagagctattaggaggctattggagaataatgcagatgagagattattacactgtctgaactaaggaggtggcggtaaaggtgtagagaagatggatttttttttaaacggtcccactgtctagagtgcagtggcgtgatcacagctcactgcaacctagacctcctgggctcaggcgatcctcccacctcagcatcctgagtagctgggactataggcgcatgccaccatgcctggctaatttttcgtatttttttgtagagattgggtctctccacattgccccggctgctctccaacccctgagttcaagtgattcacctcccttggcctccca

SEQ ID NO: 1822 - DNA, 388 bp, Homo sapiens
cacacctgtagtcccagctactcaggaggctggggtgggaggaacacttgagcctgcatttcgaagctttgcattgatgctgcaccccagcctgggtgacagagcaagacccggtctcaaaaagaaaaataaaacactaatcccttcctcagaagaggaggtaaaatccttgagtgatgtttactcttcttcatatcccataactcagatattatgatgcaaaattaataatacttaatactatgacataaagttaatacatcttatgttacattatgagggaataaaagagaaaagaaaatgaagatatttgcttgatatacacacacataaacatataaataacaaaatgaggaaatactcatggcaatcatagtcctagggtcca

SEQ ID NO: 1823 - DNA, 363 bp, Homo sapiens
cagaagaaggattgattatgatacttactcagaattttccaaaactgataaagtacattagccaacagattcaagaagctctctgactctaagctgaataaaaataaaaccactttagcaaaaaatctaactctaagctgaacaaaaataaaaccactcctagcaaaaacaaacaacaaaaacttcaaagaagcaacagtataactgattactgctcagcaaaaaatgatgcaaaccaaaagacaataagaagaaatctttaaaatactgtaagaaaattactgttcacctagaattttatacccaattaatatatccttcaaaactgaatgcaaaatagagatgtattcagacaaaaaccag

SEQ ID NO: 1824 - DNA, 355 bp, Homo sapiens
tttctaaaagtactaaaacagccttaaaaataacaaggaaaacccaatttaaaattttaatacttattgtaaagctagaataattgattctgcatggtttggaaaaacaagatatattcagcaatgaaacaggatagaaaatcaagtaatagacacgcatatatgtggtcaatcgatgttcaacaaaactgccacggcaattcagtagaagaaaagcaatctcttcaagatacgttgctggaacaattggagagccatctacaaatgaacttcaatctttatctacctcaacaagaaacacagaatagatgagaaaacaaatgtgggagctaaaaatgtaaatattctagaagta

SEQ ID NO: 1825 - DNA, 388 bp, Homo sapiens
cgttgctgtcggcgtctaccacggcctgcccgccagccacatggagctggcccaggagctcatggagacttgttaccagatgaaccggcagatggagacggggctgagtcccgagatcgtgcacttcaacctttacccccagccgggccgtcgggacgtggaggtcaagccagcagacaggcacaacctgctgcggccagagaccgtggagagcctgttctacctgtaccgcgtcacaggggaccgcaaataccaggactggggctgggagattctgcagagcttcagccgattcacacgggtcccctcgggtggctattcttccatcaacaatgtccaggatcctcagaagcccgagcctagggacaagatggagagcttcttcctg

SEQ ID NO: 1826 - DNA, 354 bp, Homo sapiens
ctccctgcaaactcaacctcccaggctcaggtgattctcccacatctagcttaatgtattaatgatgtaatagacaattactggccaggcgcggtggccagagcgagactccatctcaaaaaagaaaagaaaagaaaagaaaattactggcggcaagcaggaacattgtagattttgaaactgtcttgttttacaagatactgaagcaaggtggtgcaattattacgtccttctaaagctgatcggataaaggctttaattttgtaattttcagagaatattaccaatgtagcaagatttaccaataaccaatggttgcttgaagacaaaagaggttgttggaacttgcttaat

SEQ ID NO: 1827 - DNA, 342 bp, Homo sapiens
  misc_feature (1)...(342): n = A,T,C or G
aatgggggcctcgaagatagtaatttcttatgtcctaagctagggggtatgcatatgggagttcgttttattgccattctgtatgactcacacatgtcagaaatattctttggtcttgtattttaaaatacaagtgggccaggtgtggtggctcacacctgtaatcccagcactttgggaggccgagtcaagcggatcatctgaggtcaggagttcaagaccagcctggccaacatggtgaaaccccgtctctactaaaaatagaaaaattagctgggtgtggtggcacacacctgtaaccccttgngagactgagggaggagaatcccttgaacccaggag

SEQ ID NO: 1828 - DNA, 373 bp, Homo sapiens
actacggttgcgagatgacgacagacagggatactgtggcactgacctcaaccctgggggacagagtaagactctgtctctgtcaatattgtgatgctattgctttttttgtaacttttataccgctgagaacacagagagactgcgacgtatagaccctactaagggctttttgtctggggagcgtgtgggggagtagaagtaaacttttaaaaattcaagatagaatcgtgatgagcaagcctcatgcacatgcatgaggatggctactaccaaaaaggcagaagataacaagtgttggtgaggaagcagagaaactggaactctcatgcagtggggttgagaaggtaatatagtgcagccgcggctgggt

SEQ ID NO: 1829 - DNA, 350 bp, Homo sapiens
  misc_feature (1)...(350): n = A,T,C or G
tattactgctttcttttgtgttaaataggatttttctaatgtactattttaattcctgtgtagtttcttttgctatctatttttgtaggactattaatactaaatttataataacctagtttaatgtctacttaatctcaatattttgtaaaaactttgctcttatacagtcccatttcctcttcttttatttatctattggtgctgtgcaaattgtatctttatacacagtatgcccatcagcacggatttataattattgctttttttataccattgtcttttanatcaaacaggaaaaatattagaaacaaaaaattcatctatactggcttttatatctacttatg

SEQ ID NO: 1830 - DNA, 240 bp, Homo sapiens
tacggctccaaaaaaacaacaaagggtaccgcttgcaaaatactacaaaagggttccgctgccaaaatactacagaagggtaccgctgcgagaatactacagaagggttcggctgggggaatactacataagggttccgttgcgagaaaatctataaaagggtccggctgggagaaaactacagaagggtacccgctgccgaaaagacctcataaagggttctcgctgttagataaattg

SEQ ID NO: 1831 - DNA, 131 bp, Homo sapiens
tacgggtgcgataagacgactgaagggtacggttgctatatgacgacatatggggagccagtttctatgtctttggaagtgtcgtgtaggtggtcatctctgcttatctccgccttctcttaacgtccggc

SEQ ID NO: 1832 - DNA, 330 bp, Homo sapiens
taccgctgtgagaacactactgaagggtccggctgcgatacgactacagaagggcaccctgatcactactgctggcatccacgcctgccatccacaggcttggggacatgtccaccttgcccaccttgcccactgccaccaccactggtgcccaacgactatctggtctagagttttcatgcctagcaaagcctcaaacagtcttcagtaacaaacacaggctaagccaatgagaaactcatagataccactgacactagttatagctacctaaatacttcagaggctacactactgccctaccctgtatcaccaccaaagcctcctacc

SEQ ID NO: 1833 - DNA, 373 bp, Homo sapiens
gattgcataagctaaggagtttgagaccagcctgggcaatatggcaaaaccccatctctacaaaacatacaaaaattagccaggtatggcagctcgcacctgtagtcccagctacttggggggcagaggcgagaggatcacctgagactgggaggttgaggcagcagtgagttgagatcatgctactgtactccagcctgggcaacaaagtgagaccccgtttcttttttttttttgaaaacaaagcttggttttgacaccaagctgggcgtccagggccccaatttgtgttaatggaaggcttggcttccaaggttcacaccattttttgggtaaagcctccaaaagaacttggaacataaaagccccccct

SEQ ID NO: 1834 - DNA, 393 bp, Homo sapiens
ggcacgaggtaatcccagctactcgggaggctgaggcaggagaattgcttgaacctgggaggtagaggttgcagtagccgagattgcgccattgcactctagcttgggaaacaagagtgacactccatctcaaaaaaaaaaaaaaaaaagggggtcctttggaatttttaaaaaaaaaaaaaaagggggggggggaagggaaaaagggatcaaaaagggccaaaaaaaaagggggagggattttgggggccaaatttgaaaaaggggggtttccccttttgaaaagggccattttttttaacgggtgaaagtttccaaaaaggccgggggggaaaaaaaagggggttaaatttttttcccaaattgggaaaagacccctttgttttttttcca

SEQ ID NO: 1835 - DNA, 376 bp, Homo sapiens
cacctcaattaaaaagcagatactgctagtttggatgaaaaagcaagatacaactatatactgcctataagaaatagactttaaatataaaaacacaaataggtacaataagaatatggaagaagatattccatgttaacaataaaagaaagctgaggtggctatattactcaaagtagactgcagtgcaaagaatattataaagaataaaggtcattataatgataaaaggtcgattttatcattatgttctctgactacaatgtaattaaattagaaatcaataacatgagattatctgaaaaatacttggggaaaaaatacacacgtctaagtaacccatgggtcaaataagcaatcaaaaggaagattagga

SEQ ID NO: 1836 - DNA, 294 bp, Homo sapiens
gcgatgtctaaaaccaaatagggaaaatataaaaccaggctgggcaaggtggctcatgcctgtacaatgcttggcacaatgcctggcacatggaggccaaggtgggaggctcacttgagaccatcctggacaacgaagtgagaccctgtgtcaaaagaaaaaaacagagggagagagagagcgcgaaaactacaaacgagaggtgacaatcttccgggggggcttattttgaaaaatttttccgcctgtttctcacttaaaaaaaaaagggccacacttctaagaaaaaggggg

SEQ ID NO: 1837 - DNA, 345 bp, Homo sapiens
ctggccaacatggagaaaaccccatctctactaaaaatacaaaaattagctgggcgtgcacctgtaatcccagctactcgggaggctgaggcaggagaatcgcttaaacccaggaggcggaggttgcagtgagccgagatcatgccactgcactccagcctgggtgacagagtgagaccccgtctcaaaacaaaccaacaaaaaacagagccaggtgtagtggtgtgcacctggaacataacttctcacaacgctgccgtgggaagactgcttgaacctccaggagcgcgaggaacactctggtcataccaaccgaggtctcaaatttcaaaggcatttctattc

SEQ ID NO: 1838 - DNA, 262 bp, Homo sapiens
tgggcatggtggcaaacgcctgtaatcccagctactggggaggctgaggcaggagaattgcttcaacccgggaggcagaggttgcagtgagctgagatcgcgccattacactccagcctgggcaacaagagtgaaactccctctcaaacaaacaaaaacaaaatatctatggtgcatgtaccaagccagtaacattgtgcccaacaccaactctatgcagcatccttccatgaaaccactgtattgaaactgtcatcttggg

SEQ ID NO: 1839 - DNA, 298 bp, Homo sapiens
aactgttgtatttttaatagacaatttcacgacgttggcgaggctggtcttgaacccctgacctcaggtgatccacccgcctcagcctctcaaagcgctgggacaggcgtgagacaccgtgctgggacagtagtaacttctaatggataatgtatgcgtggggtggaaaggggagtaccagtatttttatttcaaacacatatacaaaacaccagcttgcaattcaccctgaagaaccctcagcacagagcagtttcataagtccatgccatcgtgccatatgccttcttcactggcc

SEQ ID NO: 1840 - DNA, 324 bp, Homo sapiens
ataacctctatgcatacttctttttagctgaagtatgccaggcctgtctctaacatattatgcatatttgtgataccattaagtagagagggtttttaaataataatctgactcaaaagaaaaagacaaaattgaatataatgaactccaaggagatacaggaattgtacagattgcttagagtataagaaacttgcttaagtatgtgaaacttgattgtgattagaaaaaaaaatttatttaatcctgttgttcctagttattcaacatttggacgccataaaagaaaaaatgggctgggcacagtggctcacacctgtaatc

SEQ ID NO: 1841 - DNA, 129 bp, Homo sapiens
taccgctgcgataagacgacacatggctgcggttgcgagtactcaacagactgggacgggtgggagacctcgacacaggggtgcggctgtgagaagacccaagatagtgccgctgcacataagactacg

SEQ ID NO: 1842 - DNA, 249 bp, Homo sapiens
tggtatccacaggaggtcctgtaagcaatttcctgtggatacttagggatgactgtacatggttataaaaggaaattgatcagagttaaagagagatttagtgagctgaagaaagtcagtagaaaatatctagactgaagcatgcaaacaaaatatatggaaagtacagaaaatagcattagagatgtacagaaccttatgcaaagggtgaatatgaaggaacctggagatccccaagggagagagaat

SEQ ID NO: 1843 - DNA, 344 bp, Homo sapiens
caaaccaccaccactaagtaaaccaaaacatgcatgatcaactggaaaaaaaatgcaactcatagcaaagactatacataaagagctttcagaataaagaagaaaaagaccaacaacatagtgggaaaatgtctgaaattcaaaacacactccacataaaaataaacacaaaatgacatttaaatacatgaaaatatgatcaaccttacttataataacagaaatataaattaaagctataacaaaataccatttctcacctaccagcaaaaatccaaaaggttgacaacagattccatgggtgatgttctagggaaacaggcactttcacatactgcttgcat

SEQ ID NO: 1844 - DNA, 360 bp, Homo sapiens
tcaccatgttggccgggctcgtcttgaactcctgacctcaagtgatctgcctgcctcagcctcccaaagtgctggaattacagggatgagccaccaccctcagcctgactttggccccttttaatagtaaaacaataggttttctggaaactctgaaacagacttctggttatatatcattggctataatcatgtcaactatgaccacccccaactttatgtttgatttacggcacattggccaaaataactgaacataatcgcgttacatttaaaaagaaccacgggtggcactggcgggtcttagttgtaatcccaaccctttgggaggacaaaacccatgggtcacttggggccagt

SEQ ID NO: 1845 - DNA, 359 bp, Homo sapiens
ttgcaggcagactgtagccccatttttagtcctgtttgtttgacttaaggttcagtgagtcttgtgtaacagttgtccttcttgtcagctgtctttcaactgtgccgttgactgttgtctggttgtgggattagtgccatcatgaagactggctaatgtgtttgcatgtagtgcctcattcctgctacaggaggaggtcagaaaggtaaaaccaggccaggtgtggtggctcacgcctataaccccaacactttgggaggctgaggcaggagaatcacttgaggtcgggtttgagatcaccctgggcaacatagtgagaccttgtcttccctcccaccaaaaataggtgagagtgcgct

SEQ ID NO: 1846 - DNA, 357 bp, Homo sapiens
  misc_feature (1)...(357): n = A,T,C or G
ctacggctgccagaagacgactgaagggcagctaacatcatacttagtggtgagaaactgcctttcttctaagacagagaataaggcaaagataacccctctcaccactcctattcagcactgtactggaagctctagttgccgccctaagacacgataaggaaccaaaagatgtacagattgcgaaggaagaaataaaactgtctttgtttgcagatgacatgactgtctaaagaaccctgaaacaatgaagtgactatagcaaagttacaggatacaaggttattatacacagccaattggattccaaaatgccagccaccaccagccagaatttataatcaaaaagatactatn

SEQ ID NO: 1847 - DNA, 162 bp, Homo sapiens
taccgctcccagaagtcgaccgaagggtgtggatgtttgtagggatgtatatttggtattgtggcaaggtacacataacattaaatatgctatctgaaactgtgtaagcgtatagttcagtagcatcaagtacattcgttctgttgtgcaatcataaccacc

SEQ ID NO: 1848 - DNA, 337 bp, Homo sapiens
gcccaggtggagtacaatcagcgcataagtctcctgaatgaggggcaaaaggagagacttcgggagcaggaggagaggcttcaggagcagcaggagaggcttcgggagcaggaggagaggcttcagcagctggccgagccacagaacagcttctaggagctggtgcgttgccccagctggggagcctgccctcctccctagccctccaggcctttgtttccccacctataaaatgtggcagagtagccctcaagtgaaatgttactcctaaaggcacctgtgagccagagacctgctctggtggctgtgggagacaggggaagacttttctaacctg

SEQ ID NO: 1849 - DNA, 354 bp, Homo sapiens
ggttcttagaatgtatcccccatggataaagggggactactgcacttgttcttttgcagtcattcacagacatgcacagagtggcaaaaaatttaaatcaccctacatgtactttctgggtgaggtcaaagtttcactctgtcttctcatttcagctcttatgctataaacaagtatccttttccacagtctatttagagtcatttttttttttgcatttttgcgctttttgtggggaattttgctgtttaaaaaggcccctaaccataatgttcagttgttacctagggtccctaaaggcaagaaagctatgaagggccttactgagaaaatacctatggaaaaagaggttct

SEQ ID NO: 1850 - DNA, 324 bp, Homo sapiens
gctgggattacaggcatgagccaccgcacccggctgcttccaaattaatttttgattatgatcaaaagattccaaagaatcgcttaagcataggagttcaagaggctgcagtgggccaagatcacaccactgcactccagcctggggacagagcaataccctgtctctaaaaaacaagaagattcctacagagcatgaagtcaagcaagcataacaaattggagaagctcaataacagcaaagtggggccagccatccatatacattcatttgctatgaggatgtctcagccatagggaccagacacacgagtcttccaacagg

SEQ ID NO: 1851 - DNA, 364 bp, Homo sapiens
gggggccttcactccctggagttccaaccgcagccatccttgtccccacaacttctgcagtgtcccagggcttgcctcactctaactcagcccactcacacttatcacgtgacttcatcctaaacaacaataaccttgaaatctggaatctgtcttggtcatgttcttacaaactcatgctgaaataaatgacagcagcccaggctggctgcagaggctcacacctgtaatcccagcactttgagaggccaaggcaggaggagttcaagaacaccctatgcgagatcccatctctacaaaaataaaaaattagctggggccgggcgcagtggctcaggcctgcaatcccaagcactttgggagg

SEQ ID NO: 1852 - DNA, 324 bp, Homo sapiens
tattcccattttacagataagaatcctgaggcttagagagttcaagtgacctacccaagggcacatcactgataaagggcagaggtgggattcaaacccacatctgtcaggtgcaagtgcaaggctccttctcctcatgctcactgcctgctggggaatagggcactggggacataccccagggagcccttcctcatgttctgagtcccagttcatcccatgctgctattttgctctcccaggagcatctggactccctagacagagccccagcttctcacctgtccctctctaaatgctgctctgcaggcctgtgatcctgga

SEQ ID NO: 1853 - DNA, 328 bp, Homo sapiens
ctaccctgccctgtctctaaacttttattattatccctacagaattgcattcaaccttcgctcaaggccgggtgtggtggatcacacctgtgatttcaacactctgtgagcctgaggcggaaggattgcctgatgtcctgattctcactgtctgctggacaatatagcaatactccctgtgtcccagaagcccttcctcatgatctgagtccccgttcatcccatgcttttattttgctctgccgggagcatctcgactgcctaaacagagcccccaacttctcacctgtccctctctaaatgctgctctgcaagcctgagatcctgg

SEQ ID NO: 1854 - DNA, 375 bp, Homo sapiens
gcttggctccctgcatcctccacctcccgggttcaagcagatctctgcctcagcctcccgaatagctgggattacaggcgcctgccaccgtgcctggctaattttttgtattttttgtagagacaggctttcaccctcttggccaggctggttttgaactcctgacctcataatacacccaccttggtcctccatagagctgggaagacaggcgtgcaccactgcactctgccaaaaaatattcacttatcagcgcctaatgccatgcggctgttaatccagctattcttgaggatttagtacccggattgcattgagcccaccgggtttagagctgattaaccttgacataatatcatggctctctaagggggg

SEQ ID NO: 1855 - DNA, 346 bp, Homo sapiens
  misc_feature (1)...(346): n = A,T,C or G
cccaaagtgctgagattacaagcgtgagccactgtgcctggccttttttgttttgatctttgtttttgtgagaccctctcagtccgttacccaggctggagtgcagaggcacaaccatgaccatagcttacctatgggctcctaagctcaagagatgctcctgccttagccacctacccaccaagtggctgggactacaggcatgcgccaccactcctggataattttagcatttttttgtggaaaaggagctgcatggtcaggagcataggctaaggcctggcaccccaacgctttggaaggccaaggcagatagatcacctgaggtcattagatgaagaccaan

SEQ ID NO: 1856 - DNA, 343 bp, Homo sapiens
tgacagaagggtaactgattactgctcagcaaaaaatgatgcagaccaaaagacaataagaagaaatctttaaaatactgtaagaaaattactgttcacctagaattttatacccagttaatatatccttcaaaactgaatgcaaaatagagatgtattcagacaaaaaccaagaaaactttgcactagcagaccaaacatgcacagaatgagaaactaaaggaaattcttcaagtagaatgaaaataatgccaggtaaaacatgaaaatacaaaaggaaatgaacagtgacaaggataaatgaatactgagtttacaaacagtgaatgtaatgtcctgtggg

SEQ ID NO: 1857 - DNA, 355 bp, Homo sapiens
aaggaacaaaagatatacaagacaacaggaaaacaacaaaatggtggatgttaagtcctcacttatcaataataaccttggctgtaaacagactaaattcccaactgaaaagatatagactagctgaatgaattaaaaaaaaaaaaaaacctaggtatatgctgcctaaaaaaaactcttttcccctaaaaagacccttttgaaataaaaataggggagggaaaaaaaatccttccaatgggaacccaaaagcaggggaaaatagctttccttatttcaggtaaagcaaactttaaaccaaaaagaaacagggtttttttcatttccccagaaaaatgtaccattggtaaacatc

SEQ ID NO: 1858 - DNA, 315 bp, Homo sapiens
ctgtaggacaatttaaaaaggtaaaatgtatgcataataggaatccaagacagaaaagaaagagagaaggaaacagaatacagatgctcctccacttaagtcctagtaagtccatcctgagtgaaaatactgtcaggcaaaaaggcatagctgactggaagctgaggcttgctgctgcccagcatagcaagagaagtatggtttctactgaatgcatattgcttttgcaccattgtaaagctgaaaaatcattaaaatagtagtcgaagaaaaaatggctgaaaacttttcaacatttacgacagacaccaaatg

SEQ ID NO: 1859 - DNA, 310 bp, Homo sapiens
tttttaagtgtacgatgaaattcacctgtgaagctacatttgtctagagttttctctggggagaagtttttaaattatcgctcagtttcgtatatagaattctctctaattttatttccttagcctgttttggtaggttattgttttcccagcatttgtccatttaatctaagtttgcgaatgtcttggcatcagattattcacaatatcactttaccattctaatgtctacaggggcattccctttttattccttacattattttcttggtgccttctccctttgtttcttttgattagtctcaccagg

SEQ ID NO: 1860 - DNA, 400 bp, Homo sapiens
cgttgctgtcgaacaactgcctcaggatatactctttttaatcagtattgtaactaaccttggcttattttacttttagacttggggttctattttgctttaaaacatgtacatcagttttgttttttgttttgatcttttctttcctttttttttttttttttaaaaaaaagggatttccctttgcccccccattttttaaaagtggggggggccccaattttgccctaactgcagccttgacctttaagcctaagggaaccctcccccctcaccctccaatataggggggactataggaccccccccccacccggggtaaattttggtttttcctgaaaaaccaaagtttccccttgtggtgaagctgggattgaacccccggggacaaaccaccccg

SEQ ID NO: 1861 - DNA, 360 bp, Homo sapiens
attccctattagtatgacatttacttttggttattagtaggtagtcattaacatgtttaagagtttccgctattcctgttttatagtgttattgctagaagtggttcctgaattttataaaatgccttttcagcatctattgataaaattgtatgattttttttctctttaatttgttgatgtaatgaattagaatggtaggcatttgatgtggaaccaaacttgtatttctggaacaaatactacttggtcattgtgaaataatgatttgctacatgagtggattttatttaccagtatttaatttagaattattgcattctcattccaaagtacaattggattttggccctctgatgc

SEQ ID NO: 1862 - DNA, 366 bp, Homo sapiens
cacatacgcatacctaacacatgtgcacacacgatcctgtccccatcttcctctccctggatcctccgagcatgcacactgacacagttgcacacatgcatgattgtgcatacacacacgtattcacaggcacacatccatacacacctacaagcacagaagcatgcacacaccacatgcatgcatactcacacaaaagtgcacgcatgcatataccacttatatacacaggcacacacccgtacacacccacatgcacacatgctcgtacacaagtgcacacatgcatatgccatacaattgtgcgtgcacacacacacatatatatacgaatatcccatgcatccacatgcacacatgggtacg

SEQ ID NO: 1863 - DNA, 394 bp, Homo sapiens
  misc_feature (1)...(394): n = A,T,C or G
ggcacgagggcagtacatgtacgatgattaggttgcagaatacatcgattgcatcagcaatgtggcgcacgttgggcactgccaccctctcgtggtccaagcagcacatgagcagaaccaggtgctcaacaccaacagccggtacctgcatgacaacatcgtggactatgcgcagaggctgtcagagaccctgccggagcagctctgtgtgttctatttcctgaattctgggtcagaagccaatgacctggccctgaggctggctcgccactacacgggacaccaggacgtggtggtattagatcatgcgtatcacggccacctgagctccctgattgacatcagtccctacaagttccgcaacctggatggccagaaggagtgggtncacggg

SEQ ID NO: 1864 - DNA, 235 bp, Homo sapiens
agatggagagggaaagcatttggaagacagaaactgaatacacaaattgcaaatatttgaaatgaacaagaggtcatttcctacaaattataaatgttaaaatgataagggactattatgagcaaccatatgccaataaatttgtcaatttagctgtaatagaatatttggccgggcgcggtggctcacgcctgtaatcccagcactttgggaggccgaggcgggcggatcacgg

SEQ ID NO: 1865 - DNA, 235 bp, Homo sapiens
  misc_feature (1)...(235): n = A,T,C or G
acgacagaagggaccgcgcccggccgagagttgactcttcagattcacaaggtccacagagaaacactcagaggaaaaatcaaaccaaacctnnnaaaaaaaaaaaaaaaaaaaaaaggggggggggtttttttcggaaaccccaactgggaaaaaacctttggggggttggggccaccccccctttggggggggggaaaaaaaggttttttttgggaaatttggggggcttttt

SEQ ID NO: 1866 - DNA, 320 bp, Homo sapiens
cggggattataatattcaatcaacgttatgaatgaaaagtgtattttgccttatactttcaacacacaacttactaacctaatatattcacttattaatcagataattttgtgttaaaacttacaactcttattttcattggactttgattgattaattatacatttgacaaattaaaatctcaaacatttatgcactgttcacaaacttaaactgtcttaaacatataaagacacaaaacttatatatctagcaaatttaattctctgaaatttttgttttgttttgttgagacagggtcttgctttgtcacccaggcg

SEQ ID NO: 1867 - DNA, 229 bp, Homo sapiens
tacggcctttgcattttctgttttctctgcctggacgtgctgtgcgcccatatactcacttggcttaccctcttgcctccttcaggtcactgctcaagtgtcttcttaccagagatgccttccttgactactgtctataaaatagtaaatgcggccgggcgcggtggctcacgcctgtagtcccagcactttgggaggccaaggcgggtggatcacgaggtcaggaaat

SEQ ID NO: 1868 - DNA, 417 bp, Homo sapiens
  misc_feature (1)...(417): n = A,T,C or G
gcctacggctttcgttaaaacgacacaaagggcgggatctcggctcactgcaagctccgcctcccgggttcacgccattctactgcctcagcctcccaagtagctgggactacaggcgcccgccactacgcccggctaattttttgtatttttagtagagacggggtttcaccgttttagccgggatggtctcgatctcctgacctcgtgatccgcccgcctcggcctcccaaagagctgggattacaggcgtgagccaccacgcccggccggagtaattttacaaaagagacttgttagtaactacctcatccaggttatcaaattaacatcaacagtgattaaagccaggtgataccctgtgcccgggatattatgtgatgagaatggcacatttcctttgagatcttcctcccn

SEQ ID NO: 1869 - DNA, 342 bp, Homo sapiens
ggctaacttttttgtatttttagtagagatggggtttcactgtgttagccaggatggtctcgatctcctgaccttgtgatccacctgcctcggcctcccaaagtgctgggattacaggcatgagccaccacacccgacctcccttacattcttaaaaattatggagaaccccaaagacctttgctttatgtgggttctatctattaatatttaccaaattaatattaaagccgagagaaatttaagtattttcttactaatttttaaacaataaattttaatataatgaaccctttacaagctaaagtaagacggagtctcgctctgtcgcccaagctggaa

SEQ ID NO: 1870 - DNA, 353 bp, Homo sapiens
aatcttggctcactgaaagctctgtcctctgggttcaagtgattcacatgcctcaaccccccgcgccctgcctcaaggtagctgggattacgggcgcccaacaccacacccagctaatttttgtatttttagtacagatgaggtctcaccatgtcggtcatgctggtactaaactcctgaactcatgcgtggaaactaatttaactttcctcctggatgacctttgggtttactaattatattagcggcatcatcacaaagctgtttttatctttatgaaaattttagacaccatgtttctttaaactccttctacattggaggcatgaggatacaattatccaaaaaatggt

SEQ ID NO: 1871 - DNA, 402 bp, Homo sapiens
cgttgctgtcgttcagggggaaattgaaagatatatattttagtcgatttttcaaaaggggaaaaaagtccaggtcagcataagtcattttgtgtatttcactgaagttataaggcttttataaatgttctttgaaggggaaaaggcacaagccaatttttcctatgatcaaaaaattctttctttcctctgagtgagagttatctatatctgaggctaaagtttaccttgctttaataaataatttgccacatcattgcagaagaggtatcctcatgctggggttaatagaatatgtcagtttatcacttgtcgcttatttagctttaaaataaaaattaataggcaaagcaatggaatatttgcagtttcacctaaagaacagcataacgaagcgggaaa

SEQ ID NO: 1872 - DNA, 324 bp, Homo sapiens
  misc_feature (1)...(324): n = A,T,C or G
gaagagagagaagagaatgagagagagacagagaaggagaaagaaagagaataagggggagacagagacagagagaggaagaaagacagagaaggaggaagagagaggaagagaggcgggaaggggggagagagaagaagagaatgagagagagacagagagggaagaaggaagagagggaggaagagagaggaagagaggcaggaagagggggagagagaacaccgatgaaganaggaataaaggaatagaggaagggagaaagaaagatctaggaagagagagggaggaagactgacaatatgacagcatgggcaagagagt

SEQ ID NO: 1873 - DNA, 306 bp, Homo sapiens
cgcccagctagttttttatgtttagtagagacagggtttcgccatgctgcccagggtgggatcaaactcctgagctcaggcaatccacctgccttggcctccccatagtgctaggattgcaggcatgagctactgtgcccagcctactgctctttcttctgtttacagaggaactgcaggtgctagggatacctggatgaatgaaatacagccctgccccacagtattttgtggtctggtggcaatgaccgacctgttacagaggcactttaatagagactgctatgtgtcaaagcacagctgtgg

SEQ ID NO: 1874 - DNA, 282 bp, Homo sapiens
ggaatagcttcctatacccccaaagtcctattcaggtcttggggtacacactgcccagtgggcctctttcttatcatctcagttagaatccttttctccctctatatattttgcaactttaacagttcagttttttggcaatatattgaacatatttaaagtatacaaatttatcagttttgatatctgtaaacatcccatgaaactatcactacaatcaagaaaaacatattcttagccaggtgtggtagctcacacaggtaatcccaacactttatgagg

SEQ ID NO: 1875 - DNA, 305 bp, Homo sapiens
gatgctatgtaagacaaccattgcagagacacaaagtaatcagattcttgaaggtcaatgcaaaagaaaaaaatattaaaggcagttaacgacaaggggcaggtcacataaagtggaaactacatcaaactcacaggggaactctcagcaatatcccacagtcagaagacattaagaatccatattcagcatttttgaaaaaataaaattttgaaccaagaattttatgtcccaccaaactaagcttcataaacaagggagaaataaaatccatttcagataagcaaaagctaggggaatttatg

SEQ ID NO: 1876 - DNA, 365 bp, Homo sapiens
ttgaaaggataaacaaaactgataaactgctagtctaatcaagaaaaaaaaactccaataaataaaatagacaacaataaagttacactgcaacttatacaactgaaatacagaagatcataagggattattatgagcaactatatactaacaaactggaaacctagaagaaatagataaattcctggatacatacaatctaccaagattgaatcaggatgaaacagtaaatctgaaaagaccaataaagagcagtaagactgaataagtaataaaacatctgccaacaaagaaaagttgaggacttaatggctccactgccaaattctatcaaatgggtaaagaactaacccatatttccctaa

SEQ ID NO: 1877 - DNA, 146 bp, Homo sapiens
tgtcgcctgggagacgacgaccgatggggctttgttgttgagacaggggttctcattgccctgggtgggctacatctcctgatctctagctacccacctgccttgggctccccaagggctggggattcccgattgaggcccaccgg

SEQ ID NO: 1878 - DNA, 329 bp, Homo sapiens
cagtctctactaaaagacagaaacaatacactgccaaaatgttaagttgaccaccgtgaaacttctctattggagtgtctgtttctttaagctgtgaatactgaaattatgccttgtctcctccccaccccagggggatgccgttttgcagtgtggacacgtgtttgaagcagttactaaactcgtcatcctggttaagaaggagaacattgtcaatgttgttcaaggaaggtaggtggcttcatcttcagctcaagaagtaattcaatgttaaaattgttattaaggccgaacgtggtggctcatgcctataatcccaggactttggg

SEQ ID NO: 1879 - DNA, 406 bp, Homo sapiens
cgttgctgtcggaaggagagaagcgatatcttgatacatcctatgggtattaaaaagccaatagaatattatgaataattttatgctaataaatttaacaacttcaacatcataaacaaattccttgaaaaataaaaagtaccaaaattcattcaagaagaaatagataccagcctgagcaacatggcaaaatcccatctctacaaaacatcaaaaaaaaaaaaaattagtgggccgggggggggcacccctgaaatcccactttgtctggaggttaaaggggaaggataacttgaccccaggggggtaagggatgcgggggcccttggtctccccctggccttttaccctgggggaaaaaaaagaaacccccgctcaaaaaaaaaaaaaaagtgaataatttgga

SEQ ID NO: 1880 - DNA, 405 bp, Homo sapiens
gatcccatcgattcgcattccgttgctgtcggagctccttatctgtctgagaatggggaccagctctgagtggggttgctgcctgtattccctgtttctcaggaacttacatgggtctggggaggctaggtaggtgattgtacgtggttgctcttctccttggctgggggaggtaatgagcagatctctgtgggtgtggagcttgttggggggatgtctaggaagcttcagcttagccacattcccaagtttaggtgcactgagccatatagcccagtgtatgcatgtgtgggtgtgttcatgcacacacacactctctctcttgtctctctgtctctctctcactcttactttcttactctcttctcaggtcacttgtacacttggtttcctagtagaagctca

SEQ ID NO: 1881 - DNA, 348 bp, Homo sapiens
aggtgatccacccacctcagcctcccaaagtgctagaattacaggcctgagccaccatgcctggcaatttggtttctttcaaaatagagcctgagataagaattttgggtgcaggtagtttatttgggaggtgatcccaggaagcagaagtgagcagacagagagaatgagataaggaaggaacaacagcagtataagaatgctttctagaggattcttctgagggcactgtgagttaaattctgccataatctcttaagaaccacagagaggccaggcgtggtggctcactcctgtaatcccagcactttgggaggccgaggcaggcggatcacgaggtcaggagag

SEQ ID NO: 1882 - DNA, 378 bp, Homo sapiens
tactgcttttagaaaacgacagaaaggtccactaagggcgggatccatccactaaccaacccacccatccattcatcaattgtccatctactacttcatccaccaatctctccatccatccgtcttccatccattcacctacctatttatcaatctatgaaccagctcatctaccactctctccaccagcctaccagatattaacatattaactaatccatccaaccatctatacttccatcattcatccaccaacccatccataatccttccatccatccaccatctatacatttccagccacttaaccaccaatgaacccattcactaatccattaaactattcatctatgtatccctccaccaacccacccatcc

SEQ ID NO: 1883 - DNA, 341 bp, Homo sapiens
agactcccaagtagctgggactacaggcacagtcaccatgcccggctaatttttgtatttttagtagagacagagtttcaccatgttggccaggctggtctcttgacctcgtgatccgccagcctcagcctcccaaagtgctgggattacaggcgtgagccaccgctcctggcctattggtattttggggggccaaggcttgtttttgtgcccaagctggagtggagtgcgacactctgtgctcactgcagcttccgcccactgtgtttaagatggaccttgcgcctcaccctgcccagtaactggagactatttttgcattgcaagcgagaccactgtat

SEQ ID NO: 1884 - DNA, 358 bp, Homo sapiens
cacatacacatacctcacacatgtgcacacacgaccctgtccccatcttcctctccctggttcccccgtgcatgcacactgacacagttgcacacatgcatgattgtgcatacacacacgtatccacaggcacacatccatacacacctacaagcacagaagcatgcacacaccacatgcatgcatactcacacaaaagtgcacgcatgcatataccacttatatacacaggcacacacccgtacacacccacatgcacacatgctcgtacacaagtgcacacatgcatatgccatacaattgtgcgtgcacacacacacatatatatacaaatatcccatgcatccacatgcacaca

SEQ ID NO: 1885 - DNA, 138 bp, Homo sapiens
ctgactggaattaattaaactaacctttctttgccttactacgtgcttaccacagtgaaagtaccctccctagccaggcggggtgacttatgcttataatcccatcactttgactgactgaggcaggtgaatcacctg

SEQ ID NO: 1886 - DNA, 317 bp, Homo sapiens
agttgtttcttttatcaaagagaggtgctagaggcctctgcaaaaaaattttcatttatgtctcacatggccacaccttggtatagagaaaactgggaaagccaatccagtacttagctttccaggctctatgatggcaattgtcaaggagagggttagaaatgtgtgttggggcaggacacggtggctcatgtctgtaatcccagcgctttgggaggccaaggcaggtgggtcacctgaggggaggagggtctcaatctcttgaccctatgatctgacaccttcggtctcccaaagagctaggactacgggcatgg

SEQ ID NO: 1887 - DNA, 81 bp, Homo sapiens
acgacagaagggtgcggctgctagaatacgaccgaggggtcatcttttaatagcaagaatcatattttttttccagtaccc

SEQ ID NO: 1888 - DNA, 386 bp, Homo sapiens
gagcaagactccatctcatagggaaaaaaaaaaaaaaaaagccgggcccggggacttaaaccttgaatcccaggcttttgggagggccggggggggggtacaaaaggccaggaattcaaaacccccccggttttaggggaaccccccttttttaaaaaaaaacaaaaattaattgggggggggggggggcccctggaaacccaatttcttgggggggtgggggcaaaaaaatctttaaaccccaggggggggggttccaagagcccaaaattccccccattgtccccaattggggggaaaaaacaaaaattttttttaaaaaaaaaaaaaaaaaaaaaccggggggggggcggtttaacaaaaaaagaaaattccccacggcccgg

SEQ ID NO: 1889 - DNA, 122 bp, Homo sapiens
atcaactgctatgacggttcacaatgtcagtataccagaaggaatagaaaactgatactgttttaaataatctgtcattgtacctttttttttttgctgaactacattctatgggacgtggg

SEQ ID NO: 1890 - DNA, 383 bp, Homo sapiens
  misc_feature (1)...(383): n = A,T,C or G
cgttgctgtcgaaggagaagaagatgatgatgatgatgaagaggaggaaggattagaagatattgacgaagaaggggatgaggatgaaggtgaagaagatgaagatgatgatgaaggggaggaaggagaggaggatgaaggagaagatgactaaatanaacactgatggattccaaccttcctttttttaaattttctccagtccctgggagcaagttgcagtctttttttttttttcccccttggccccccccccccttgttttgggggccttttttctttcccccgggctccccattttttgggggggaaactccttgggccccaccccctggggaaaaaaccctcccccctttttggtcagaccccatctttttcccccn

SEQ ID NO: 1891 - DNA, 335 bp, Homo sapiens
ggagatgcttttccttctgcatgttaactcacaactcattcctaatcatggtggctctaatccaactgactaaaatgcttttctccccaaggaactaacgtagttacttgagagaagagtttaatccagcttctcctgcgtggcaaagggttttttttcatcagagggtagctgacttcaataagggcatttacaacatcccaagggcttattttcatttaagaaatttggccgggcgcggtggctcacgcctgtaatcccagcactttgggaggccgaggcgggtggatcatgaggtcaggtgatcgagaccatcctggctaacaaggtgaaat

SEQ ID NO: 1892 - DNA, 337 bp, Homo sapiens
  misc_feature (1)...(337): n = A,T,C or G
cggggacggctccgagaagactacagatgggaatagtattggtaaaaccgtgataaaatcaaattgttttctgatagaatatcactttaccatgtaatcaatttatgaatcttctccctacaacactatttaataattactcttataaaaatatgctttgaagtatccaaacctaaagttaaaatgagtcatggaattgtaatggcaatagaaaaattacaatcacattatcagcaaaagctgacagtttgactccctctttaccaatctggatgtccagacagtaactgctgtcttcaagagactcacctaacacataaggaatcacataaacttn

SEQ ID NO: 1893 - DNA, 312 bp, Homo sapiens
gaaactgagtctcagagagacaaggtaactggctaataagttcgaacactgtttttcccaagactatttgactcaaaatacagaggaagtttggtgtgtgtgtgtgtgtgtgtgtgtgtgtgtgtgtgtgcgcgctttcatatttactatatagtagagctctttaaataactctctgagacagaatgaaaatatacacgtgttggggtgcgcgcagtggctcacgcaattctcccctctctgtgggaggccacgctgggtggatcacctggggccgagagtgagacaccactctggcccgtggggagacct

SEQ ID NO: 1894 - DNA, 325 bp, Homo sapiens
aatgtaaaacataaaaatataaaacttccagaaaacggcacaagagaaaatctagatgaatttggatttgtcaatgactttttagatatggcatcaaaggcaagatctaggaaataaaaagttaataaaatggactttgttaaaataaaaactatatgctacatgatagacgtctagcgaatgaatagacaaacacgggctgagagaaaatatttgtaaaagatctacttgataaaggactgttatgcaagtatataaagaaccctaaaatctcaacagcaaaaaaaaatctgattagaaattgtgtcagagactttcacaaacg

SEQ ID NO: 1895 - DNA, 394 bp, Homo sapiens
cgttgctgtcgggcaaaactcaacagcccctggagctgcgcttgtggtggagctggaccctgattttagctggaccttgtttttagagacagggtttccttctgcagtctcaatctcctagccttgattgatcctcctgccttggcctcccaaagtgctgggactacaggtgcatgcaaccacacctggctaattttcttctcttctttcttttctttttttttttttggagggaaacttgtttgggggcccaagtggggagaaaagggggccattctggtttattggaaccttggcccccgggggtaaaacaatttttcgggctaaaccccccaaggaggtgggaaaaaggggggggcccacccgcccgggataatttttgaattttaaagag

SEQ ID NO: 1896 - DNA, 340 bp, Homo sapiens
cagaccattcgtgacatgcttggactttttggtttgttctgaacatctttctttcttatacaaccactcattttattcttggtctaaatttaccatacaagattatttttcatacaaaattatttctcatttgggcatagtggctcatgcctgtaatcccagcactttgggaggtcaaggctagtatgtcacctcaggtcaggagttcgagaccagcctggccaacatggcaaaaccccatctctactttaaatacaaaaattagccgggcatggtggcaggcacctattattccagctactcaggaggctgaggcaggataatcacttgaaccctgctg

SEQ ID NO: 1897 - DNA, 321 bp, Homo sapiens
tcctcacctttgagacttcaaagataggccagatgtaggaacaaaacggctgattagaagcagctgcagtccgcagcactcacaaagagaaatgaaaaggggtgagtgaattcagcaccttcaatggaaatatccatgttcttgcattgggaataactaggtgaacaacttgacccatggaaaataaagaaaaggaggggggtgacaaaccacccaggagtggcacagagcccaaggaaccaccaccccaagccaagggaagtggtgagtgatagtgtgaccccactctgttaccaatgaacaagctaacctcatgatgag

SEQ ID NO: 1898 - DNA, 129 bp, Homo sapiens
gaaagttcagcatcacttattatttggcagtgcctctcatgcaatttaacacatcaaataaggctaattagtttaactttcctcttggtaccaggagaaaaaattaattcttttgacctatttcatggg

SEQ ID NO: 1899 - DNA, 351 bp, Homo sapiens
ccagtggtgaatgagacagacctattcctcacctttgagacttcaaagataggccagatgtaggaacaaaacggctgattagaagcagctgcagtccgcagcactcacaaagagaaatgaaaaggggtgagtgaattcagcaccttcaatggaaatatccatgttcttgcattgggaataactaggtgaacaacttgacccatggaaaataaagaaaaggaggggggtgacaaaccacccaggagtggcacagagcccaaggaaccaccaccccaagccaagggaagtggtgagtgatagtgtgaccccactctgttacaaagtaacaagctaacctcatgatgacaggag

SEQ ID NO: 1900 - DNA, 138 bp, Homo sapiens
ggaagatttagcattttttttcattgccctctcagtacctaattctgtaaatagaagttttttcctgtattttcttctaagagttttatagttttagctcttaatgtttaggtgtttgatcctcaaaaggtatttatt

SEQ ID NO: 1901 - DNA, 334 bp, Homo sapiens
tatgcataagacaaccatggtgcactgcagccactaactcctggcctcaagtgatcctcacacctcagtagtcccatagttgggactctagggtgtgctaccacacacgacttaagatttatatttttaaaaaaactggaggtataactatataaagtgcaaaaatcttacatatacaacccaaatttagacacatagaaactatatgaatatatatgtaaccattatcaatataaaatatttttaaaataaaattaattcaaaatattatattctaacacactgccttatggttagataccataaggcatgtaaaaagttactacagataaag

SEQ ID NO: 1902 - DNA, 418 bp, Homo sapiens
cgttgctgtcgaagaattagaagagaatccagaaagcacagtctatgatgattataaatttgtcaccaagaaagaccttgaaaatttagggctcacccacctcattggatctcctttcctccgggcatatatgcatgggtttttcatggatataagactctatcacaaggtgaaactgatggtaaatccatttgcttatgaagaatataggaaagataaaatacgacagaaaatagaagaaacacgtgcacagagagtccagttaaagaaattgccaaaagttaacaaagagctggcacttaaattaattgaggaagaagaggagaagcagaaatctacatggaaaaagaaagttaagagtcttcctaatattctcaccgatgatcgatttaaagttatgtttgagaaccctgacttc

SEQ ID NO: 1903 - DNA, 444 bp, Homo sapiens
ggcacgaggccgcatggcttcggtctcctctgcgaccttctcgggccacggggctcggtccctactgcagttcctgcggctggtagggcagctcaagagagtcccacgaactggctgggtatacagaaatgtccagaggccggagagcgtttcagatcacatgtaccggatggcagttatggctatggtgatcaaagatgaccgtcttaacaaagaccgatgtgtacgcctagccctggttcatgatatggcagaatgcatcgttggggacatagcaccagcagataacatccccaaagaagaaaaacataggcgagaagaggaagctatgaagcagataacccagctcctaccagaggacctcagaaaggagctctatgaactttgggaagagtacgagacccaatctagtgcagaagccaaatttgtgaagcagctagaccg

SEQ ID NO: 1904 - DNA, 391 bp, Homo sapiens
accatgttaggcaggatggtctcgaactcctgaccttgtgatccacccacctcggcctcccaaagtgctgggattacgggcgtgagccaccgcgcccggcccctgacttccatccttaacaggagaagctacaaacacacattgtaaaagtgcatgaatataaggagaagtgaggcatggtggccatctttgccatctaccacattagtagaagagaaaaaataaaataaaataaaataataaaaaacttgatggatccttaaactgtaagaaagaaggaataaatgaaccacagaatgatgaaacaaatagaaaacaaatagtaatatggtagatgtcaacccacatatatcagtaattacattaaatgtagatggactaaagtcaaaga

SEQ ID NO: 1905 - DNA, 344 bp, Homo sapiens
ctcacgcctgtaatcccagcactttgggaggccaaggtgggcagatcacttgaggtcaggagttgagtccagcctggccaacatgacgaaaccccatctctaccaaaaaatacaaaaattagatgggcttggtggcatgtgccttgtagtctcacatacttgggaggctgaagtgggagaatcacttgaggccacaggaagtgggggagtaccactgcactacagcctgggggacagagtgaaacccaaaaataaatagacaatgatgctcagccatgactgtttcaacacagacatatttgctctttaaagaaaaaaacccttcatgaatattcatccttttc

SEQ ID NO: 1906 - DNA, 263 bp, Homo sapiens
  misc_feature (1)...(263): n = A,T,C or G
tcaatatctttagccattagagaaatacaaattaaatgagatgccattccacacctactagaataaatacaattaaaaatactcatcatcttttgtgttggtgatgatttagaacaactgtaattctcaaatactgatggtaggaaagtaaaatgatacagccactctgggaaaaaaaaaatggactgtttcttacaaagttaaatagacccccatcattttacctacttattctactgttgctctttaagcagaaaacagan

SEQ ID NO: 1907 - DNA, 368 bp, Homo sapiens
cacttaaagaaatgagaaaaagaattacaaactaagcccaaaataagcatataaaggcaataataagactagagtagaaataaataaaatagagaattaaaaaaaaaaaaaaggcaaaccgggaacggggggagggggctaatttttgaattcccaccattttgggaggccaaggaaggcggacaacaaggccaaaaaatcaaaaccttccttgccaacaggaagaacccctttctttattaaaaaaaaaaaaataacttggccccgggggggcaggcttgaagggccacttactcggggggctgaaacagaaaatttgttggaacccaaaagggggggttggaggggccctaatgggggcaatggag

SEQ ID NO: 1908 - DNA, 408 bp, Homo sapiens
cgttgctgtcgcctgttcaacctcagcaaggttatattcctccaatggcacagccaggactgccaccagtaccaggagcaccaggaatgcctccaggcatacctccattaatgccaggtgttcctcctctgatgccaggaatgccaccagttatgccaggcatgccacctggattgcatcatcagagaaaatacacccagtcattttgcggtgaaaacataatgatgccaatgggtggaatgatgccacctggaccaggaataccacctctgatgcctggaatgccaccaggtatgcccccacctgttccacgtcctggaattcctccaatgactcaagcacaggctgtttcagcgccaggtattcttaatagaccacctgcaccaacagcaactgtacctgccccac

SEQ ID NO: 1909 - DNA, 311 bp, Homo sapiens
  misc_feature (1)...(311): n = A,T,C or G
caacacgagaagtaatgcaggtactttaaggagctaagagggaaacagaaatctcagccctataacaaggaactgtatgagcatagaaacattctcctcctcccccagtaactttatcaaaactcttaaaaatttcccctctttggcacaaacatatggacacctttctcactccagagtaaaggaatgatgtactaaaatgaaggatttataccgggtggggtggctcatgcctgtaatcactttgagaggctcaggtgggcggattgcttgagctcaggagatcgatcagcctgggcaacatggtgaan

SEQ ID NO: 1910 - DNA, 324 bp, Homo sapiens
agataaaaattaaaacataaaattaaaaaatttttgaaaacgatgttttcagacatacaaaactgaaaggaatcatcaccagtagacctgcactacaagaactgttaaaggaaattcttcaggcagaaaggtaattgtaccaaataaaaatatgatcccacaagagaaagaaagagcatccaaatcggtaaagaggaagtcatactgtcactgtttgccgatgatatgatctttgacaaagcaaacaaaaacataaagtggggaaagcacaccctattcaacaaatggtgctgggataattggcaagccacatgtaggagaatg

SEQ ID NO: 1911 - DNA, 364 bp, Homo sapiens
gttgatgggaatgtgaaatagacatcctatctaaagggcatcttgagtatatctaaatttaaaacacacgtaccgtttgacctaataatcccacttttttttttcttttgagactgagtctcactctgtggcccaggctaaagggcagcagcttaatctcggctcactgcaacctctgcctcctgggatcaagagattctctgggcctcaaccttccaaggagctggaattacagaggcccgcctccccacccgactgatttttggatttttagtaaacaccttttggacacctggaaatccaacgcaaacgtcatatatttatatccactctttcacaaaaacttttctttcttttttgttgg

SEQ ID NO: 1912 - DNA, 382 bp, Homo sapiens
cgttgctgtcggggcattataagtaattaaagatgatttaagtatatggaaagatgtatataggttatatgcaagtactgtgccattttatataaagcacttgaacatcacagattttggtatcaatgaggggtgctgaaaccaattgcccatggataccaagagacagctatatttgtttcaatgtgtacctctccttctaaactcagttcttaagcatatagtatctttatagctatacacctagtgtctatcagaccctaaactatggtaggccctcaatacattttattgttataggtagatagataggcatgagtagggcaggagagggctctccctccacccactagaaatgtcaagtgatgttttaaaaattgtg

SEQ ID NO: 1913 - DNA, 351 bp, Homo sapiens
aaccaatgtttccaactgcatcctgttataaagagagagcaaattttattaaacttatgtaaataattcttgccataaaaaataagaatactcatggatagtttctgaattttagaggaatcaaatagggacaaaaaaaatgtttccacctttgttcacaaagtataccaaattactgtaaactaataagtagcttaagagaaagaaaaggtttccttaaagctagaaaacaaaatatttaaataaagaacctggctaggcatggtggctcatgcctgtaatcccagcactttgggaggccgaggtgagcaaatcacctgaggtcaggggttcgagaccagcctggccaac

SEQ ID NO: 1914 - DNA, 394 bp, Homo sapiens
  misc_feature (1)...(394): n = A,T,C or G
ttttgccttcagaagcttccctgaaaatcacgaataggaggcagataaatagtagaaaaggcatacaggtttctgcaatgtgtgtacaccggagacgttagaactaagacccagacacacgatgcgtgcagaagcttatctaccacatgaagtttacagaaagaatggggtcttggatcacagggaaaaaataaaggttatgtgagaaaacgaccctggctagcaacagtggacttattgcataggtggaatctcactaggagcagtcctcagagagaataaacagaanatgtttctttcagacctttggagacctcagactctcatttaagctttcctagatccagacaaaggggcagacctcagagaaagcctggctgcatcaaggcagatn

SEQ ID NO: 1915 - DNA, 369 bp, Homo sapiens
tacggctgctagaagactacagaagggtacggctgctagaagaccacagaagggaatgatattattagatcactgaagcagaaaattagcaaagatatttaggacctgaaatcagcactgaaatcagacagaaaacactcctcaacaaatgcaaaaaaaaaaaaaaaaccggaatttttaacaccccttttaaaaccacaccccattcaatttaaaactcaaaacggacaagccctttaaaaatcttccctttaaaaaaatttggaaaaactggctcctgaaggacttggggaaaatatggattttaaggcaaaatccaaaaatttttttgaatttattaaaaataaggggccaacttcacaaaatttt

SEQ ID NO: 1916 - DNA, 363 bp, Homo sapiens
  misc_feature (1)...(363): n = A,T,C or G
cggttgcataggcaaagggagattaaaaaacaatctgctcattgctcctgagctattggaattttctccttaactaaggtatgagctcctggagctcttaaatgtctatgccaaggtctcaagccagaagccacagctacaatccggcctggagataggtgtggntttgacgtgcacactgtacaaacaaaacaatatccattgtttcaaagatcagatttcacataaaaatgtggattatcacaatttcttttctttgcttttaacttttagagacaggcttgatatgttgctcacgctgatcttgaaatcctgggctctagtgatccttctgctttatcctcccaagcaggtttgttttac

SEQ ID NO: 1917 - DNA, 311 bp, Homo sapiens
atacacatgacatttttttttcttttttttttttttggggggggaatcctccttttgcccccaagctggagggaaaggggcccaattcggttaacttccaggccccccttccgggtttaacacatttttctggctaaaccctccaatggagcggaaataaggggcccccgcaccaaccccaagatattttttaaaaattttaaaaaaaaaaggggtttaccccgtttaacccgggagggttagactctcggaaccagggaattaccccccttggccccccaaaggggggggaatcacggattagccccctt

SEQ ID NO: 1918 - DNA, 319 bp, Homo sapiens
gaagacttacttaccctaagtatatatgcacccaacattggagctcccaggtttataaaacaattacttctaaacccaggaagagacttagtcacacaacaacagtgaggaacttcaataccccactgacagcattagacagatcatcaagttataaaactaacaaagaaattctggacttaaaaattgaacacttaaccaataggaccttataaatatattaagaatatttcaccccaacaccacagaatataaaataatcttatctgcacatgaaaacgactctaagatcaaccacataatcattcataaaaaaggc

SEQ ID NO: 1919 - DNA, 405 bp, Homo sapiens
cgttgctgtcggaacagaatagagagccccaaaataggcttacatgaatatggcccactctctctgacaaaagaacatgacagttcaagggaggaaggataatcttttcagcaagtggcgctggaataatgggacatcgacatgcaaaaaaaaagaatctagacccatccttaccccttaacttaaaatgttaaaatagattcttttttccttcgacctagagcccttgacaaaatggatcttaaacctaaatgtaaaacccaaacactataaaactcctagaagacaacataggagaacatctaggtgaccttgagtttggtgatgaggttttagatacacaaaaagcataatccatgaaagaaataaattggacttaaatgaatttaaaacttctggaagcag

SEQ ID NO: 1920 - DNA, 366 bp, Homo sapiens
gagtgtttgcagagacgtgaagccaaaactaatagaactgaggaaaaatagacaaattcacaatacagttggagccttcagaacttctccctcagtaataaatagaagtagacagaaaaatagcaaggatatagatgaagtgaacatcaccatcaaccaactgaaatgctatagagcctcacacccccaaacagcacaatacacattcttttaaaccacagatggaacattcaccagcacagaccatattctgaatcagaaaacttaaatttataagaattgaaagcatgcaaagtatgatctgacaataatgaaatcgacatagagaaatgctagggtctgaggatgtgagaagatacagtctat

SEQ ID NO: 1921 - DNA, 248 bp, Homo sapiens
aagataaaatttgaaatctggttaggctggtgttagggttctttgtttttggggtttggaagagatgtgttaaatgttatgtttttaaaatagtatttttgattattttgtttgcatgtggttaatttagtttaattttggtgcggtcctggcatattgtcatttttttcttatggttctatggaagacttgcccatttttccaccgtttgttggtaacgctctggtttgtgttatcctatgattcag

SEQ ID NO: 1922 - DNA, 354 bp, Homo sapiens
gtggttgtttaaaagggtattgtttcattttcacgtatttgtgaatttgccagtattccttctgttattaatttctaggtttattccattgtaatcagaaaaatggtttgcatgatttcggctttttaatatgtattaagacttgttttgtagccaacatatggcctatcctggagaatgtttcatgtatacttgaaaaaaatttgttgttatacggagtattctgttggctctaattggccttcaaaccctttggtttctgttgataatatatctcagcacactattcataattggaagtggtgtactaaaatctccgactgtttatcctatgaaaaagacactttcacatgg

SEQ ID NO: 1923 - DNA, 347 bp, Homo sapiens
tgagtagctacaaaagagaccttatggcctgcaaaggctaacatatttactatctggccctgtacagaaaaagtttactggcccctcctctaaggcatgatttattattggatcgttcccagcatggagcacttcctgcccttgcctgcttcagctcctcttcctaacactgctgtagaatagaggaaactgagccatgaaaagactatttcaaagtctcagagagagtgggattagagttccatagggcccctgagtctgtgacattcccctcaagcctggggtgagatgctggcgatatccagcccttagagaacaagcggtggaatggaagggaggaaaatcat

SEQ ID NO: 1924 - DNA, 342 bp, Homo sapiens
tttgtgagtttttaatcaaatatgtatgtcattgttcttcattttatttatgcctaaatgcgtcttgtcttcacacatagaaaattttgtcattgatttttttttcactttagtttagaagaaataaaattccttataagaaattgttggccaggtgtactggctcacgcctgtaatcccagcactttgggaggctgagatgggaggatcctttgaactcaggagttcaagaccagcctggataacatagtgagatcccttctctatcaaaaatacaaaaaattatccaggtgtggtgggacgtgcctgtagtcccagctgctcaagaggcggaagtaggac

SEQ ID NO: 1925 - DNA, 313 bp, Homo sapiens
  misc_feature (1)...(313): n = A,T,C or G
aggggctggattgattgatatatggaaatgtaatcacagttttccaggaacccaaatctttatctcccctaggagcagcgtttcagaattcacaaataaagtgcttgaggtgactttatagaacataactattgcatataacaagacctaaatgcattcctttctaaatggaaatctaaacacagagtttgaaaatttaggtaacactaaattcccctttcttgtacttcataagtaacgaagtatgaggaaattataaaaggtgtaaaagtgggtttggcattgtgctaccaatgctaatgggaagatgacn

SEQ ID NO: 1926 - DNA, 360 bp, Homo sapiens
gtgggcaaaaggtggtagcatttcccttgagaatcagaagaagacaatgatgcccactctcaccactcctgtccaaaatagtattggaaccctagccaaagaaaccaggtaagagaaagaaataaaaggcatccaaagagaagagaggaaatcaaactatctctggttgcagatgatatgattctatacctagaaaatcaatcatctctgtctgaaagccccttgatctgatttaaaaaaaaaacttcagcagaatttcaagatacaaaaataatgtacaaaatcagtagcattctcatacaccaacaacatccaagctgagagtcaaatcaataatgtaatcccattcacaatagccac

SEQ ID NO: 1927 - DNA, 316 bp, Homo sapiens
cagcacatgaaaggattatacaccatgatcaagtagaatttatctctaggatgcatagatatttcaacataatcaatcaatgtgactcactacattaacagacaacatgataatcccaatatattcagaaaaagtatttgacaaaattccacataggctcatggtttaaaaaaaaatccttcaacaaaatagataaagaacaaacttactgcaacacaataaagaccacttatgaaaagctcacagccaacatcataatcagtgaggtaaacgtttttcctctgagatctagtacaagatgatgttgcccactctc

SEQ ID NO: 1928 - DNA, 361 bp, Homo sapiens
gagttggagaagggggagccctcatgaactggctgctatgaatacaaaatgatgcccttgctgcagaaaacaatttggttgttcctcacagaatgagcattgggtgaaaaatgaaatcaagatggaaatgtaaaaaatttcttcgaactggatgacacaacctatcaagacctttgggatacagcataggcactgctaagagcaaactttgtagtcctaaaaacctacgacaaaaagtctgaaagagcacaaatagacaatctaagttcacttctcagggaactagagaaacaggaacaagccatacccaatcccatcatacacaggaaatacccaagatcagagccgaactaaatgaaat

SEQ ID NO: 1929 - DNA, 358 bp, Homo sapiens
  misc_feature (1)...(358): n = A,T,C or G
gccatcatatgttctcatttatttgtgggatctaaaaatcaaaacaattcaactcatggagatagagagtacaagatggttaccagagactgggaagagtagtggggaaattgggggaggtgtgggaggtttttttntnttnttntttntggttgacgagaagaccttatggagcgtttaattattattgcaaggggtacctaaaaaccgataggggtttaaggaacctgcctggggttaatattttccattaggcgatcttctgtggggaaccccaccttccgagcagtcatggctttaattccccaatgtaaggcgaacttctattcctttattggtcggaaaaaattggtcgacg

SEQ ID NO: 1930 - DNA, 338 bp, Homo sapiens
gttatgctatatggcaagggagaattacagttgcagatggaattaatgttgctaatcagttgaccataaaatagggagaccataatatggtcaataggagtttaccataaagctaggttttgtagttgggagggagggtgtagtgtattcagaaatatcctggccgggcacggtggctcacacctgtaatctcagcactttgggaggccaaggcaggcagatcatgaggtcaagagttagagaccagcctgaccaacacggtaaaaccccatctctactaaaaatacataagttagccaggtgtggtggtgcacgcctgtaatcccagctactcagga

SEQ ID NO: 1931 - DNA, 310 bp, Homo sapiens
agaatcgcttgaacctgggaggtggtggaggttgtagtgacccaggatcatgccattgtactccagcctaggtgacaagagcgaggctccatctcaaaaaaaaaaaaaaaaaaaaccaaaccctttggcttttgttggtttttgaaaaaaagtttaattttgtcccccagcctaaagggcagggccgggatgtggcctaattgaaatttgaactccgggcctaaggggatccacccacctaaccctccaaaagggctgggtttatgggcttgacccattgaccccagctggaaacctttaactttttaat

SEQ ID NO: 1932 - DNA, 342 bp, Homo sapiens
  misc_feature (1)...(342): n = A,T,C or G
agagggcagggcttacagggctgtcacccttattctccgctgagctgttttaacacgtagccatccgcagatggcagcttctaaaagagcattaattgtaacagacccccagacactaccatggggccagagcccaaaagtgctcaccccagctcctacacctgcccctgcccatctgcgtgctctccctcccataaggggtttgagcacgtgtcggccaagcaaacgagcttcacccctgtcacaagtcctgagaggagtcagggaactctcccatttcattctgacacaggtgggactcagcattctcagaccttcaaaggcctgttgggtggatgtggn

SEQ ID NO: 1933 - DNA, 283 bp, Homo sapiens
  misc_feature (1)...(283): n = A,T,C or G
atcaatgaaggattgataaaagttctcctggtgtctccgcagagtgccttccaggaacagatctttgcatagaatatcagtggtttccttttttgtttcaaatagtggtcagaaaatacccagtgttgactcaccaaggcaatcagcttcctttttccctttttttgtttttttttaacattttatatttttgctttattttattttattttattttattttattttattttattttattttttgagacggagttccactctgtcgccagactggagtgaagn

SEQ ID NO: 1934 - DNA, 383 bp, Homo sapiens
cgttgctgtcgcaaatttcttcctgctcagaccatagtcctaattacttaagaaaaccccttctaactgtgtggatcttttaacgtatggtgcacatgagtgcatggaaatgagagaacctgggtgacagagtgaggcactgtctccaaaaaaaaaagggaaaaaaaaaaaattttttttggcttggatgaagggggggctaaccctttattcccaccctttgggaaatttgaggttgggggatcatttgacctcaggagttggaacccaccctgggcaacacagggaaacccattctttacaaacctttaaaaaaaaatgggccgggccggggggttaacccttgtatttccagcctttgggaaggccaaggcggccggttt

SEQ ID NO: 1935 - DNA, 317 bp, Homo sapiens
  misc_feature (1)...(317): n = A,T,C or G
tgtcaccagcggactcatgatgacatcaaagactataacaatgacaacctccacagactccactcttggaaacacagaagagacatcaacagcaggaactgaaagttctaccccagtgacctcagcagtctcaataacagctggacaggaaggacaatcacgaacaacttcctggaggacctctatccaagacacatcagcttcttctcagaaccactggactcggagcacgcagaccaccagggaatctcaaaccagcaccctaacacacagaaccacttcaactccttctttctctccaagtgtacacaatgtgn

SEQ ID NO: 1936 - DNA, 320 bp, Homo sapiens
tgtcaccaacacactcatgatgacatcaaagactataacaatgacaacctccacagactccactcttggaaacacagaagagacatcaacagcaggaactgaaagttctaccccagtgacctcagcagtctcaataacagctggacaggaaggacaatcacgaacaacttcctggaggacctctatccaagacacatcagcttcttctcagaaccactggactcggagcacgcagaccaccagggaatctcaaaccagcaccctaacacacagaaccacttcaactccttctttctctccaagtgtacacaatgtgacag

SEQ ID NO: 1937 - DNA, 386 bp, Homo sapiens
cgttgctgtcggttaagctgtctcagaaagaattgcttggtccaccagaggcaaagagagcccgaggccctgaggaagaggagattgggagccctgagcccatggcagctccagcctctgcctcccagaaactcagccccctacagaagctaagcagcatggacccggccatgctggagcgcctcctcagcttggaccgtctgcttgcctcccaggggagccagggggcccctctgttgagtaccccaaagcgagagcggatggtgctaatgaagacagtagaagagaaggacctagagattgagaggcttaagacgaagcaaaaagaactggaggccaagatgttggcccagaaggctgaggaaaaggagaaccattgtcccaca

SEQ ID NO: 1938 - DNA, 349 bp, Homo sapiens
gtctacatatacacatatgtctatacttgtgtttggatattgtctacatggtaccaaattgccgtaacaataaatgagtaatcaaaaattaaataaataagcccaaatatttttcaagttcttgtgacttgagtaaatcttttggtaaatatgagtagcttaatatagttggtttaataaaaacaaatgtcttttgacttatcagcaaaatatgcatgtatttaatgttaaggtgattgcttttatgatacttagataacatatgataatattaatagcaaaatggttaatacaaaatttaagctgagatgatggctagatttgtctaacggctcatgaaatttttcca

SEQ ID NO: 1939 - DNA, 341 bp, Homo sapiens
gaatactcgtgaataaactttgcaaaactatttgtaaagtactataaggaattctgagaagttactataagatagaaaagaatataggagcatgcccaagccatatatatgatgtttcacgtaatatgcttggtagacttgtaaaatattttagatgtggtgtaggaataaatctttgatgtaatttgtttttttgtatatgtatatgattttgaaatttgagacagaagctataccatgaaccaggctggaatgcgatggaaccatcttggctcactgttgcctgcagctacctgggtcaagtgattcttctttttttggccttccatggagcatgagat

SEQ ID NO: 1940 - DNA, 342 bp, Homo sapiens
ccctcccaccctctgtttttttcttcttcttctctctcttttttttttttttaaaaaaaagggggcctctggcggggtggcccaggcgggccaacatcccaaattcccaaattcccccgggcctaaggggatcctctaacctaagccgccctttccaattttgaccccacccccagtaaaaataacttgtttggcccgcccaggggggctcaggacggaaaccccaccatttgggggggccggggggggaaaaccactggaccccaggagtttggggccacccgggccaacagggggagacggcctctcctaaaatccaaaaatttccccgggggggggggg

SEQ ID NO: 1941 - DNA, 311 bp, Homo sapiens
cctgtggtgttattgtatacacacatatatatatatgattttgtgcatggttcctgggtcaaactcccatggccgttgtcttttgttagaacagtcttttattagaacagtctagtaaaacagttctaacagtcttttgttagaacactgggtgtgttaggcctcaagaaacggaccctctccagccttattttggcctagtttcacctgcccaaaggcaggtctctaatcttcccctgcctttttgaatgcgggtcataagactgtacccagaggccgaacgcggtggctcatgcctgtaaacctagcac

SEQ ID NO: 1942 - DNA, 327 bp, Homo sapiens
gattataatcaagtgtaggcttcctgaattttgacatccttttagaacttgggtctggaattccagaaatgttaattgctgcttgtatttgttcttgtttgttttttagccagtatttgccctttctatccagccttatgaataatagcagtaaaatcacagtatcttggtcagtctttattttttccttttttcttttttaagagacagtcatccaggccagagtgcagtttgatgatagcttgctgaagcttcccactcctgggctcaagttatccttccattttggcctcctgagtagctagaccataggtatgcatcaccaca

SEQ ID NO: 1943 - DNA, 325 bp, Homo sapiens
  misc_feature (1)...(325): n = A,T,C or G
cggtaaggagttttcccacttgaaataaaaaaatgctagacagcaacatgatggcatagaaaagtatgaaactcattggtaaatacaaatatatagacaaatactgaatattactgtaatgatggagggtaacacacttttaattcaactgtacatgttaaaagacaaaattagttaaaataactataaataaatatatggtaaaagatataccatatgaataaatgaacatagtgccaacaataatataaagtgtagggagaaaataagttagagttactggatacaattgaacataagctgttatctgcttaataaggactan

SEQ ID NO: 1944 - DNA, 322 bp, Homo sapiens
attccttatttgaaaaagagcaaagttgctcatatcctcaatatcagtccaccactgaacctaaatccagtttggttcaaacagcactgtgcttataccattgctaagtatggtatgtctatgtatgtgcttggaatggcagaagaatttaaaggtgaaattgcagtcaatgcattatggcctaaaacagccatacacactgctgctatggatatgctgggaggacctggtatcgaaagccagtgtagaaaagttgatatcattgcagatgcagcatattccattttccaaaagccgaaaagttttactggcaactttgtca

SEQ ID NO: 1945 - DNA, 330 bp, Homo sapiens
ggctcaagaggaatgctccaggaaagggatagtggatgaattcttcccgctgttgtcaaactaatgtatatggactcaaccacagggatatccccagagctcctatggaacactagcaaattttgtgtttttgttcagtccgacatgggctggccctcatcttgcagctctgtaatttttcaatttacacccaacaaatgaacttgagcattgccatcccagctatggtgaacaacacagccccacctagccagcccaatgcctccacagaacggccctccactgactcccagggctactggaatgaaactctaaaagaatttaaagcaa

SEQ ID NO: 1946 - DNA, 384 bp, Homo sapiens
  misc_feature (1)...(384): n = A,T,C or G
tacggtttcgagttgacgacagaagggcttaaagacaaggatactttccaagaaatgcttccttacacaattttggcattgtgtgaacatcgaacagtgtgttgacgtaaacctacatggtatagcgtactgtatagtatagatagcccaggggttccttatctctcagccacggtatcagtccatcacctgttaagaaccaggccacacagcagtaggtgatcagcgggcaagctagcagagcttcatctttatttgcagctgctcccattgcttgcattaccgcctgagctccacctcctgtcagatcagcggtagcattagattctcataggagcacaaaccctattgttaactgagcatgggacgtatgtatggacatan

SEQ ID NO: 1947 - DNA, 361 bp, Homo sapiens
tcaaaagaaagttgtaaccctgtgatatgaatccacacaccacagagcagtttcatggataactaaccactttctagttttaactgggaataccccttttttcccttattactcaatgaactgcagaatgtccctttgcatattccaaaaagagtgtttccaacctgctgaaacaaaataatactttaactctctgagctgaatccacatatcacaaaggagtttctcagataggatctttctagtttttggctgaggatatttggtttttcctcataggcctcagagggctcccaaatgtctcctcacagattctaacaaaagagtgtttcaaacttgctgaatcaaaagaacattttag

SEQ ID NO: 1948 - DNA, 393 bp, Homo sapiens
ggcacgaggttgggtagagacggggttttattcgtgttagccaggatggtcttgatctcctgagctcgtgatccgccctcccgcctcggcatctcaaagtgctgggattacaggcgtgagccacggcgcccggacttccttcttttttaagcaaagcctgttagaatggcttggatctcgaggtggcgtcttacccgacctccgagggctctgcagccgctgcgggagaatgaccctgtcggtatttttgaggctgctttgagcgcggccccctgccaagtacccggccatcaaggccctgatgcggccagacccgcgcctcaagagggcggcgctggtgctggtgctggtgcagatgctggcctgctggctggtgcgcgggctggcctgacg

SEQ ID NO: 1949 - DNA, 317 bp, Homo sapiens
  misc_feature (1)...(317): n = A,T,C or G
cagcacaccaacatggcacatgtatacatatgtaacaaacctgcacgttatgcacatgtaccctagaacctaaagcataataataaaaaataaataaataaataaaaagaaattaagcctcctttttttttttttttttaaaaaggatttccacttttgtggccaaggctgatgggngtggnccnaaagctatcataaactttagtcccccttctcaacttgaatctttccagaaaaaaccactcccgcttattacccgaaataggagaaaaaagttcaatgggaaaacaaagtggttctttattccttaaaaagag

SEQ ID NO: 1950 - DNA, 350 bp, Homo sapiens
aagggtctcacctgccagagatctgtgcaattaaaaacacccacagctgaaccgttcaggggctggcaatttttttttttttttttttttaaaagggactcgggttttgtggccaaggtgggggggaaaaggggcaatttttgttttttgaacccttaacttccggggttaaaggaaggggcccacttaagtttccggggaagttaaaacaaaggggccacacaaaaaaatcgggcaaattttaaaatttttgggggaaacgggagtttcgttttgttcccaaggtgggtttcaaattcgggggttaagggaaccctccggcttgggtttccaaaagggcggggataaaa

SEQ ID NO: 1951 - DNA, 415 bp, Homo sapiens
ggcacgaggaagagcaaccgagatgattgtgaagatgctgagccggaatccggacaattatgtccgcgaaaccaagttggacttacagagagttccaagaaactatgatcctgctttacatccttttgaggtcccacgagaatatataagagctttaaatgctaccaaactggaacgagtatttgcaaaaccattccttgcttcgctggatggtcaccgagatggagtcaattgcttggcaaagcatccagagaagctggctactgtcctttctggggcgtgtgatggagaggttaaaatttggaatctaactcagcggaattgtatccgtacaatacaagcacatgaaggctttgtacgaggaatatgtactctcttttgtgggactttctttttccactggtggggatgacaa

SEQ ID NO: 1952 - DNA, 345 bp, Homo sapiens
gatttgaaaggaatgaggatcctgcactcttcctccctcagtaagtaaatgccagtccctaggaagagagaaccaaaatgtctaccggaccagatgtcaaggctacagtgggggacatttccagtgatggcaatttaaacgtggctcaagaggaatgctccaggaaaggtttttgttcagtccgacatgggctggccctcatcttgcagctctgtaatttttcaatttacacccaacaaatgaacttgagcattgccatcccagctatggtgaacaacacagccccacctagccagcccaatgcctccacagaacggccctccactgactcccagggctactggg

SEQ ID NO: 1953 - DNA, 342 bp, Homo sapiens
gccagtccctaggaagagagaaccaaaatgtctaccggaccagatgtcaaggctacagtgggggacatttccagtgatggcaatttaaacgtggctcaagaggaatgctccaggaaaggtttttgttcagtccgacatgggctggccctcatcttgcagctctgtaatttttcaatttacacccaacaaatgaacttgagcattgccatcccagctatggtgaacaacacagccccacctagccagcccaatgcctccacagaacggccctccactgactcccagggctactggaatgaaactctaaaagaatttataagcatggtaagttaatgagactct

SEQ ID NO: 1954 - DNA, 330 bp, Homo sapiens
aggcgtgctgtgcaaatggcacacctggtccaaccaatcttttgtgccctatgtaaatcagacaccgcctcctcaaactcatttataaaacctgcatttcactgcagaagtggcaatccattttctccagggcccctctctgttcagagagctctttcttttgcctgttaaacttctgctctgaacctcattctttgtgtgccggcgtcctagttttccgtggccatgagaccacgaatctcaggtatttaccccagaccacagtgctgcttcattaccacgttcctgattcctaaaggcccagggcagattgaaccctaagttcagttt

SEQ ID NO: 1955 - DNA, 320 bp, Homo sapiens
caaaggcaaagatgttacagaaaaagagaagaatatagatttatatcctttatgaatattgatgcaaagacgttcaacaaatactcacaaattgaatttaacaatatatcaaaagattatacatgatgatcaaatgagatttattcctggaatgtatggctaattcaacatacaaaaaaacaataaatgtaatacaccacattaacaaaataaaggattaaaaaaagaccatttcaaatactgcagaaaaagcttttgacaaaattcaacactcttgcatggtaaaaacagtcaacaaactaggaatacaaataatgtcc

SEQ ID NO: 1956 - DNA, 323 bp, Homo sapiens
ggctgctctctggccactagagccaggcagtcacctagctgctgttatgctgcatacctgtctctgagtactcgcttcatccatcggccagggtctgtgggacagaccaggcaggtggtgccccatgtgaggaacgctgcaatggattgcaagggaacccctgaaaacaaatgtgaagtgactgagcagtgttaaccttagaagactagaacctaatgagttatggcaaacagatgttatgcacgtccctgaatttggaaaactaaaggcctctttggattccagcacgaggcatcaaaccataccatggcatgggtaggaac

SEQ ID NO: 1957 - DNA, 355 bp, Homo sapiens
  misc_feature (1)...(355): n = A,T,C or G
gaaagaaagaagaaaagatcttgtaaaagttttcacccaaaacattttcactttgccacaactttcaaagctaccctttatctactcttcacactccaaataatactaacaactttaactcgcagtaaagtatagcaggagtagtaactaccatttattaaatgcttattatgtatcaagtaccatgctgagttctttatgtcatctcatatatttattttgagacagggtctcactctgtcacccaagctagtagtgcacaatcatggctcactacaggcttgacctcctgggcttaagcatcctcccacctcagcctcccgagtantaanactacagatatgtgccaccactg

SEQ ID NO: 1958 - DNA, 172 bp, Homo sapiens
cacccatcaagtcattattaccctcactgtcgacccaacacaggcatgctcatgtgaagatgcgaaaaaacgacagaaaggaacgggggcgtttttttgatagatcgcaacgggggagaaacctttgggggagggggcccgcccccctttatgaggggggggaaaaaatggt

SEQ ID NO: 1959 - DNA, 344 bp, Homo sapiens
gaggtgcccgagctactgagggtctaagtccgggcagccgaagagtgtggttagcaagatgaacaaagatgcgcagatgagagcagcgattaaccaaaagttgatagaaactggagaaagagaacgcctcaaagagttgctgagagctaaattaattgaatgtggctggaaggatcagttgaaggcacactgtaaagaggtaattaaagaaaaaggactagaacacgttactgttgatgacttggtggctgaaatcactccaaaaggcagagccctggtacctgacagtggaaagaaggagctcctacaaagaataagaacatttcttgcttaacatgccagcc

SEQ ID NO: 1960 - DNA, 337 bp, Homo sapiens
gaaagaaagaagaaaagatcttgtaaaagttttcacccaaaacattttcactttgccacaactttcaaagctaccctttatctactcttcacactccaaataatactaacaactttaactcgcagtaaagtatagcaggagtagtaactaccatttattaaatgcttattatgtatcaagtaccatgctgagttctttatgtcatctcatatatttattttgagacagggtctcactctgtcacccaggctagtagtgcacaatcatggctcactacaggcttgacctcctgggcttaagcatcctcccacctcagcctcccgagtagttaaaacta

SEQ ID NO: 1961 - DNA, 348 bp, Homo sapiens
ggctgatgccattttcagcctcagcacgcctgcacccaggcgctcattaaaacagcatgttgctccccactgcctcgtgttgtctgttggcgcgctgacggggttcgaaccgatacaagaaccttccacctacctggtgctttggcctcatctataagcttttccactgtcctgaaacaagatagagaatctgagcggccagtcatctgccctaagtgctgccgccgaagactgaatgtcctggaaagtttgctgtcacatctccattatgacaaaagcattgcgccgaacagatgaaaaaatgcattgtcaacggaatcttttatgtttggttgtcttcctttaagc

SEQ ID NO: 1962 - DNA, 328 bp, Homo sapiens
tgggtatatataatttacagaaagtctatgtgtaaatcattgactgacttaactccgactgatcactctctgtacggaaccacctaatgagatctttttgcctgacacctagatagagcccattaccaagacagaggaattacaatacagagtttaatccatatagaattggctaaatgggagattcaagttttattattactcagatcaccctttccaaaaatccagagggtagggttttctaaacacggtttgttgggcagcggtctaaggaatgaggaaagctgattggttgtgttgcggataaaatcataggggttaaaactgt

SEQ ID NO: 1963 - DNA, 137 bp, Homo sapiens
tgtaaataaagttttattggaacagaaacacactcctttgtttacatagtggctatggctgcctttgtgatagaatagcagaattaattgactgtgccaaagattgtacagccagtaaaataaaaaatatttactgg

SEQ ID NO: 1964 - DNA, 323 bp, Homo sapiens
  misc_feature (1)...(323): n = A,T,C or G
ctcctctttccaggtgctccccgagcctcacaggtctggctcctgggcacgtagcaagctctttccctacctttacttccttttcattccctttttttttttttaaacttaatgggggcaaggttaacatataaaaaaatccccttttttggaaaaaagaaacaaggggttttaagaacctttacccattagggcaattataacaggccggtttaaaaacatggttatggaccaaaaaaacccctccggcggggggggaccacctgaagtcgggagttaaaaaccagccggaccaacagggggaaaccccatctttacaaaan

SEQ ID NO: 1965 - DNA, 320 bp, Homo sapiens
gctgctctctggccactagagccaggcagtcacctagctgctgttatgctgcatacctgtctctgagtactcgcttcatccatcggccagggtctgtgggacagaccaggcaggtggtgccccatgtgaggaacgctgcaatggattgcaagggaacccctgaaaacaaatgtgaagtgactgagcagtgttaaccttagaagactagaacctaatgagttatggcaaacagatgttatgcacgtccctgaatttggaaaactaagcacgaggcatcaaaccataccatggcatggctaggacccaacccggtaccaaaa

SEQ ID NO: 1966 - DNA, 363 bp, Homo sapiens
ggataagctacaacataaacacatctaggttcttgttcttagaatacagcatgaagaatttgctttcttctttcttcctaacattttcatgtgagatccagaaaggacacattgtctctggccattcgaagaaagaaagaaagaaaaaaaaaagggtttttagagaccgagagagaaaaaggctgaaatgggttcgctgggttctaaaaatccgcaaaccaaacaagcccaagttcttcttttgggacttgactcagctgggaagtctactctcctttataaattaaagcttgctaaggatattaccaccatccctacaataggtttcaatgtggaaatgatcgagttggaaaggaatctttc

SEQ ID NO: 1967 - DNA, 363 bp, Homo sapiens
cggggttcttgttcttagaatacagcatgaagaatttgctttcttctttcttcctaacattttcatgtgagatccagaaaggacacattgtctctggccattcgaagaaagaaagaaagaaagaaaaaaaaggtatttagagacagagagagaaaaaggctgaaatgggttcgctgggttctaaaaatccgcaaaccaaacaagcccaaggtcttcttttgggacttgactcagctgggaagtctactctcctttataaattaaagcttgctaaggatattaccaccatccctacaataggtttcaatgtggaaatgaacgagttggaaaggaatctttcactcccagtctgggatgtgggag

SEQ ID NO: 1968 - DNA, 341 bp, Homo sapiens
tataacaggaactcaaagacaatgcacagggctataatctaagaacagatgtattaacagccttactcactgtaaggctgggaacccttgaagccaggcattatatgcacattctcaaatatgatgctctagttaaagccttggtaatatatataaccaatgtttccaactgcatcctgttataaagagagagcaaattttattaaacttatgtaaataattcttgccataaaaaataagaatactcatggatagtttctgaattttagaggaatcaaatagggacaaaaaaaaatgtttccacctttgttcacaaagtataccaaattactggtaactaa

SEQ ID NO: 1969 - DNA, 384 bp, Homo sapiens
  misc_feature (1)...(384): n = A,T,C or G
tacggctgctagaagacgactgaagggtgtggtacattcagacattgtaatattacccactgctaaaaagaaatgtgctattaagctatgaaaagacatggagaaaaatgcattttactaagtgagagaagccaatctgaaaaggctacatagtatatgattccaagtacagttgactcttgaacaatacaggtttgaactgcatagatctacttatacagggattttttttcagtacatacagttggccctctgtgtctgtgggttctgcctctgcaatgaaacatggatagaaaattcagtattagcctgggcaacaaaatgagaacctgtctctacaaaaaatttaaaaatttagctgggcgcagtggctcacacctgtan

SEQ ID NO: 1970 - DNA, 317 bp, Homo sapiens
gaaaacattgctcctaactccaccgcctaccccaaaacctataagaactaatgataatcccaccaccctttgctgactctcttttcggacttagcccgcctgcacccaggtgaaataaacagccttgttgctcacacaaagcctatttggtggtctcctcacatggacgtgcatgacattgggtgctgaaacccgggacaggaggactccttcgggagaccagtccccttcccctgtcctcgccctcactccttgaggagatccacctgcaacctcgggtcctcagaccaaccagcccaaggaacatctcatgaatt

SEQ ID NO: 1971 - DNA, 299 bp, Homo sapiens
aactgttggattttgttagtattctctattatttttctattctccattctacttatttctactcttatctttattatttcttcccttctggtagatttgggtatggtttttttctttctttttttccaagtttcacaatctgtagatttaggttgttggtttgacgcctttcttatctttaaatttaatggtgtatagctataaattgcctcgtttgcactgttttcactgtttcccatacgtttggtatggtttctttcatgtgcattcatttttaagtatttttctatttcccttgg

SEQ ID NO: 1972 - DNA, 285 bp, Homo sapiens
ggttatcagccaagagtttgtatctagtgaaactaagcatcatatacgaaggaaagatacattctttttcagacaaacaaatgctgagagtatttgccactaccaagccaccactatacgaactgctaaaaggagctctaaatcttgaaacaaatccaggaaacacatcaaaacagaacctctttaaagcataaatctcacaggacgtataaaacaaaaataccatttagaaaacaaaacaaaacaaaaaccaaggtatacaggcaacaaatagcacaatgaatg

SEQ ID NO: 1973 - DNA, 305 bp, Homo sapiens
tacggctccaaaaaacaacaaaagggtccggttgcaaaaaaacaacaaaagggtccggttgcaaaaaaacaacaaaagggtccggttgcaaaaaaacaacaaaagggtccggttgcaaaaaaacaacaaaagggttcttttttcaaaaaaccacacaaggttacgcctgcatgcagaccactgaggggtccctctgtgacaaaaccatcaacctttacggctgccccaataccaccaatgggtacgtctgcgccaaaactacagacggggacggtgtgagacctcaacagaagggtatgattttt

SEQ ID NO: 1974 - DNA, 387 bp, Homo sapiens
ggcacgaggtgagccaaggtcacgccactgccctcctgcctgggcaacagagcgagattcttatctccataaaatgaaacaaagcaaaacaaagggagagagaatggaggttgcctgttactgcatcataatcttgtttatgctgactgatgcattagaggtactaatggcatgagaggaacaatttcctgagacacagtttactgaccatgaatttcctcaaaaccccagagagcaggcttctcaggaggagactcagtgtggaatcccttgccaaggtagaccctggttctgtagcaggacgagccgcagacaaatctcctcaagacaccggattaaagaaggaaaaggtttatttggccaggagcgtcagcagatttgtgtctt

SEQ ID NO: 1975 - DNA, 368 bp, Homo sapiens
  misc_feature (1)...(368): n = A,T,C or G
ggatgccattttcagcctcagcacgcctgcacccaggcgctcattaaaacagcatgttgctccccactgcctcgtgttgtctgttggcgcgctgtcggggttcgaaccgatacaagaaccttccacctacctggtgctttggcctcatctataagcttttccactgtcctgaaacaagatagagaatctgagcggccagtcatctgccctaagtgctgccgccgaagactgaatgtcctggaaagtttgctgtcacatctccattatgacaaaagcattgtgccgaacagatgaaaaaatgcattgtcaacggaatcttttatgtttgtttgtcttcctttaagcaacattgccttacttgttataan

SEQ ID NO: 1976 - DNA, 339 bp, Homo sapiens
gtggggcacgcctatattcccagctactcaggatgctgagatgggaggatcaactgggcctagggaggtcgaggctgcagtgagctgtgatcgtgccactacactccagcttgggcgacagagtgagacctcatctcagaataatatgaaataaaataaaatataaaataaaatactataaggagtcctttaggctgaaaggacaacaaattagatggctagttgaatccacacagagaaataaagagcattggcaaaggtcattgcatagataaatatacagtataaaaatatataggcttactctttccttcttttaactaaattaaaagatgaatg

SEQ ID NO: 1977 - DNA, 342 bp, Homo sapiens
ggctgatgccattttcagcctcagcacgcctgcacccaggcgctcattaaaacagcatgttgctccccactgcctcgtgttgtctgttggcgcgctgtcggggttcgaaccgatacaagaaccttccacctacctggtgctttggcctcatctataagcagcttttccactgtcctgaaacaagatagagaatctgagcggccagtcatctgccctaagtgctgccgccgaagactgaatgtcctggaaagtttgctgtcacatctccattatgacaaaagcattgtgccgaacagatgaaaaaatgcattgtcaacggaatcttttatgtttggttgtctt

SEQ ID NO: 1978 - DNA, 406 bp, Homo sapiens
cgttgctgtcgaaatggggctgagtgcagtggctcatgcctgtaatcccagcacttagggtgccaatgtggattacctgagcccaggagtttgagaccagcctgggtaacagtgagacccccctccctacaaaagattttaataattagttgggcgtagtggtgcatgcctgtaatcccagctactctggagacaggtggaggggattgcttgagcctgggaagctgaggctgcagtagccatgactgcaccactgcattccagcctggttgacagagtgacccttgtctccaagaaaaaaaaaagcaaatgggattaaggactcatggaatgggaaggggaaaggggagtcttactatatgtggaataaacttgctcagtgttgccacagagttacattaccaat

SEQ ID NO: 1979 - DNA, 357 bp, Homo sapiens
ggattttgatagggattatattgaatctgtagatcaatttgggagaattgccatcttaatgatattaagtcttccaatttatgaacttaggatgtctttctatttacttaggtcttctttaatttctttttttttttttaaaaaaaaaaatccccctctgttacctccctgggacccccggggctcaagcagcccttccctttcacccccccaagaagttaggcccccgggggcccccccccccctctatttctggggggaggaaggcactcccctattttcctctctttagaaatctgggtcgcccattctcgcccccatttcgcctcccctcctttccttgtctcctcaacctct

SEQ ID NO: 1980 - DNA, 361 bp, Homo sapiens
gcccactggcgggactggacagatcaccgcagaaaactaacaaattctcgacttaaattgaagttttgaccaaatggacgtaatacacacgtacagaataccctacccaacaaccacagaatacacattttactcatctttgcatgctctaaaaatgaccacatgctcagtcataaagcaagtctcaataaattcaaaaaagcagaaatcataccaagcatctgtttggaccacagttgaataaaattagaaatcaataccaagaataactctgaaagccacgtaagtacatggaaatgaaacagtttgctcctgaatgacgtttggctaaacaaaattaaggcagaaatacaaatttttt

SEQ ID NO: 1981 - DNA, 341 bp, Homo sapiens
  misc_feature (1)...(341): n = A,T,C or G
cacatccatgaatgtcaagcgtccctaaaatgaggaccacattgtttacaacactaaaaatgtagaaattgtactcaatttagttgataaacatttttgaatattaagctattaaaaatggcagatcattaaaaaacatagaaacttcaattccaatctctagtaaatgttcacattcaaaaatatgtagtatttttaaaaattcagatggggttttactaggttgcccagaaagatctcaaactcctggcttcaagggaagagtttaatcctgccccagcctcccaagaagatgggattataggcatgcaccactaaccctggcctataaatacactttn

SEQ ID NO: 1982 - DNA, 357 bp, Homo sapiens
  misc_feature (1)...(357): n = A,T,C or G
ctctcaggctgtgtgagccatttgagaagatatacagcagagggaatacttcgtatgtcattctatgaagttcacatcacccatttaccagaaccagactaacaatgttcccgaaaaaaattacagattaatatctctcatgaccataaatgctaaaatcagaatattgggacatcaatcccacaaatttataaagagaattatacgccattaccaagtaaatttttttttccaggtttgtaagactggttcaacattcaaacgttgattaatatgattcatcacatgaaaaagtaaaatgagaaaacagtacaatcatatccctagattcagagagagcatttgacacaatccacn

SEQ ID NO: 1983 - DNA, 324 bp, Homo sapiens
  misc_feature (1)...(324): n = A,T,C or G
ggctgatgccattttcagcctcagcacgcctgcacccaggcgctcattaaaacagcatgttgctccccactgcctcgtgttgtctgttggcgcgctgtcggggttcgaaccgatacaagaaccttccacctacctggtgctttggcctcatctataagcttttccactgtcctgaaacaagatagagaatctgagcggccagtcatctgccctaagtgctgccgccgaagactgaatgtcctggaaagtttgctgtcacatctccattatgacaaaagcattgtgccgaacagatgaaaaaatgcattgtcaacggaatctttn

SEQ ID NO: 1984 - DNA, 309 bp, Homo sapiens
gctctttaccctcattggcgcttctctcctgcagtccgcctctgggccctgccgcatttcttgagacttaaagtggcattctaaaggcaatttaaaaatcatgtcaagctcagttgaacagaaaaaagggcctacaagacagcgcaaatgtggcttttgtaagtcaaatagagacaaggaatgtggacagttactaatatctgaaaaccagaaggtggcagcgcatcataagtgcatgctcttttcatctgctttggtatcatcacactctgataatgaaagtcttggtggattttctattgaagatgg

SEQ ID NO: 1985 - DNA, 305 bp, Homo sapiens
gctctttaccctcattggcgcttctctcctgcagtccgcctctgggccctgccgcatttcttgagacttaaagtggcattctaaaggcaatttaaaaatcatgtcaagctcagttgaacagaaaaaagggcctacaagacagcgcaaatgtggcttttgtaagtcaaatagagacaaggaatgtggacagttactaatatctgaaaaccagaaggtggcagcgcatcataagtgcatgctcttttcatctgctttggtatcatcacactctgataatgaaagtcttggtggattttctattgaag

SEQ ID NO: 1986 - DNA, 321 bp, Homo sapiens
actttaagatttatatgaaaaggaaaaagcattagaataatcaggagttttgaaaaagaaaaatgaagctgaaagaattacactaaccgattttgagatttgctataaagatacattaatcaagacaatatggtgttagtgaaaggatagacccataaatcaatggaacataatagagggtccagaaataaatccacacaaatatggttgattgatttttaaaagttgcaagaattctgaaaggtgaaagacagccattgctacaaatatgccataacaaacaaaaaagccattcttgacttatacaatactctatgatgg

SEQ ID NO: 1987 - DNA, 365 bp, Homo sapiens
tcaaaagaaagttttaaccctgtgatatgaatccacacaccacagagcagtttcatggataactaaccactttctagttttaactgggaataccccttttttcccttattactcaatgaactgcagaatgtccctttgcatattccaaaaagagtgtttccaacctgctgaaacaaaataatactttaactctctgagctgaatccacatatcacaaaggagtttctcagataggttctttctagattttgtctgaggatatttggtttttcctcataggcctcagagggctcccaaatgtctcctcacagattctacaaaaagagtgtttcaaacttgctggatgaaaagaaaaatttaactcc

SEQ ID NO: 1988 - DNA, 381 bp, Homo sapiens
  misc_feature (1)...(381): n = A,T,C or G
cgttgctgtcggataaaataagggttttaattcccagctatctctctcaaattttaagagagatgttatggactgtgctctccccacaacccggcccataagtcgcatgttgaagttcttacctctagtaccttggactgtgactatatttggaaacagggcctttaaagagacagttaagtgaaaaggaggcctttagtatgggcctagtgtaatctgaccagcccttatcagattaataaagttaaatacacagaaagataccacagatgcattagcgcaaaggaaagaccatgtgagcacacgaagagaaggcagccataggcaagccaaagacagtggccttagaagaaatcaaccctgccagtaccttgatcttgn

SEQ ID NO: 1989 - DNA, 124 bp, Homo sapiens
gctaaatctatccccatacccactcgaccttactacgctacaaccttagccaagccatttactccattaaatgtttagtcgatacaatttggttctttggcgccttacgatattgtttccggtg

SEQ ID NO: 1990 - DNA, 325 bp, Homo sapiens
  misc_feature (1)...(325): n = A,T,C or G
cacgtgtgggggcttacgactcttaggctcccccttcaaaaggcctttgtttgcgaatcatgagatcctaatacttaaaccgtcctcaccatcatgtggaaaccatgtctttactacaactactgcatttattctattgttctggctcacatctgtagatcccaactgctctggaggctgaggcaggagaattgcttgagcccatgaagcataggttgcagtgagccgagatcattccattgcgctccagtctggcgacagaacaagactctgtctcgnaaaaanacattataaannnnttttggcggcctttttttctaaattg

SEQ ID NO: 1991 - DNA, 380 bp, Homo sapiens
cgttgctgtcggtgaaccaccgcgcctggctgagataggttgttttttgaattaactattcttttttttttttttttttttccgaaccaaaatttcctttggggtcccccggctggagggccgggggccaaaaaataaggcttctgggacccttggccccccaggtttaggggattccccggccttaatttcccaagcaggggggattaacgggttgggcccctccccccgggggattttgttttttgggaaaaaacggggtttttcaatgggggccaggcgtgttttgaatctcccaccctggggggaccacccctccttgggcctccaacggcccgcggctaccagctcgccaccccactcccatgcactgcagtctg

SEQ ID NO: 1992 - DNA, 352 bp, Homo sapiens
accaaaaagcatgacatatagaaaacaaataacaaaatgcagaagtcagtccttccttatctgtaattacattaaatgtaaatgaattaaaaggcagaaactggcagaacagatgaaagaaaaaacaagtccaactatgcacagtctacaagatactcactttggattcaaagatgcatataggttgaaaggagaaggatgaaaaaatatattccatgcaaaaaacaaggaacaaaagagtggctatactaatatcagacaaaatagactttaagacaaaattgttgggccaggcacagtggctcatgcctgtaatcctcagcactttgggaggccgaggcaggcagatcac

SEQ ID NO: 1993 - DNA, 404 bp, Homo sapiens
  misc_feature (1)...(404): n = A,T,C or G
ggcacgagccgagatgaaggtgaagatgctgagccggaatccggacaattatgtccgcgaaaccaagttggacttacagagagttccaagaaactatgatcctgctttacatccttttgaggtcccacgagaatatataagagctttaaatgctaccaaactggaacgagtatttgcaaaaccattccttgcttcgctggatggtcaccgtgatggagtcaattgcttggcaaagcatccagagaagctggctactgtcctttctggggcgtgtgatggagaggttagaatttggaatctaactcagcggaattgtatccgtacaatacaagcacatgaaggctttgtacgaggaatatgtactcgcttttgtgggacttcttttttcactgttggtgatgacn

SEQ ID NO: 1994 - DNA, 398 bp, Homo sapiens
cgttgctgtcgctattattcctgagaatttgttatattaggattagcaaaaacaaagctgattggtaatataactaacataaattgcttggtaactttatttttttaagattatggtttagcgtgtgtcacattttatggagttaattctacagtgtaaagtttgagcttgattttagcatttcagtgacttgctaataaaataaataatttaccaccattgtcctataccatttcttttgacaacagtgagctactgttataattaaggcagtaattactattgagaaattcactgaagcaggtagaagaagatagattgacttgttgttttcctttaacagaaggatcaaaacccagcagagtgcaagcagcagtgaagcaagatgtatgtggccc

SEQ ID NO: 1995 - DNA, 360 bp, Homo sapiens
aattcgagcggctgcttcctttttttttttttttttttaaaaagaaatccaccttttgtccccagactatgaaggcaagggggccaacccagatgaatggatccctctgcccccggggtaaaagaattttttgccctaaccctccaaagaagtgggattaaaggcccctgacacaatgccagggtaattttttggaatttaaaaaaaaaaggggggttcaatattgtggctaaggcggttttgaacccccgacccgggggaccaccccccttggccccccaaaggggtgggattaacgggttggacccacgggccgggcctttccttgtttttttttaaaaaccaattaggggggtgtgg

SEQ ID NO: 1996 - DNA, 122 bp, Homo sapiens
gatggcagtgccaccatgctggatcttgccatggactgtggggtcaacttggtttatgctggacccggtgatgattcttttttcatgttggtactttgcatgttggtagttcgtacaagctt

SEQ ID NO: 1997 - DNA, 368 bp, Homo sapiens
agcatgaagaatttgctttcttctttcttcctaacattttcatgtgagatccagaaaggacacattggctctggccattcgaagaaagaaagaaagaaaaaaaaaaagggtttttaaagacagaaagagaaaaaggctgaaatgggttccctgggttctaaaaatccgcaaaccaaacaagcccaagttttttttttgggacttgactcacctggaaagtctactctcctttataaattaaagcttgctaaggatattaccaccatccctacaataggtttcaatgcggaaatgatccagttggaaaggaatctttcactcacagtctgggatgttggaggacaggaaaaaatgagaactgttggggg

SEQ ID NO: 1998 - DNA, 345 bp, Homo sapiens
  misc_feature (1)...(345): n = A,T,C or G
ccactacactaacaagcttccaatgaggaaacaaagttaccagaggaatctgaagtctctggtggccacagcagcaacaaaactcaacaatgacaaccaaagcaactaccaacatcaaacacagcccaattcctagtcagattaagataaattaccatgtcaaaggtttatttacctcagtatctattacgctatctaagatgcctgacttttacccctgagatacaaagcatgcctaagcaagaaaaatcacagtctaaggagacaaagcaagaatcagaaccagacttagatatgtaacagttgttggaactatcagacaggaaatttaaaataaccataatn

SEQ ID NO: 1999 - DNA, 319 bp, Homo sapiens
gcaccttgaggaccattcacttcttggatgcaatcaaagaacttttccatctcacttccttctcccagtgtccacatagtgcccctcaatgtttcattctcatggtttaaagcactggcttcaggcggtgaagatcagcaaagacactcgctcagctgggtatttgtatcaggctgggttcctcagagaaggagaaactaagccaacaggatatttgtgtgagtgtgtgtgtgtgtgtgtgtttgtgtgtgtgtgtaatatatgtcataaacatctatttactattgtatggtatttatttatgaataatattatatac

SEQ ID NO: 2000 - DNA, 352 bp, Homo sapiens
agaggttgaggctgcagtgagctgacatccccactgcactccagcctaggtgacacagcaagactttgtcccctgttattaaaataaataaagattgaggttggtccgagtacagaggtatttgcaactgattgattacaactaggtacagatttgtttgttccttctccactcccactgctttacttgactagcctaaaaaataataataataactctctctatatatatattttagacagagtctccctctgtcacccaagctggagttcaatgggcatgatcacgacttactggagcctcaacctttccaggctcaggttatccttccaacctaacttttctgaagagg

SEQ ID NO: 2001 - DNA, 310 bp, Homo sapiens
gagcaccatcccccccttttttttttttttggaaaagggaccctctttttgtcccccagctaaaaggggagggccgggatttgggttaatggaaacctccccctcttgttttaaggggattttcttgcctacccctccaaaaaattgggaataacaggggcctgccccccccccggggagatttttgttttttaaaaaaaaacggtttcaccggggggggccgggtggttttaaacctcgggccctagggggacccccccccctcgccctcccaaggggttgtttttacgggcaggaccccccccccccc

SEQ ID NO: 2002 - DNA, 326 bp, Homo sapiens
ggctgactctcttttcggacttagcccgcctgcacccaggtgaaataaacagccttgttgctcacacaaagcctatttggtggtctcctcacatggacgtgcatgacattgggtgctgaaacccgggacaggaggactccttcgggagaccagtccccttcccctgtcctcgccctcactccttgaggagatccacctgcaacctcgggtcctcagaccaaccagcccaaggaacatctcatgaatttcaaattggcagctgaagactgatgctgcccgattgccttggaagcccccctagaccatcacagatgccgagcttcggt

SEQ ID NO: 2003 - DNA, 387 bp, Homo sapiens
cgttgctgtcggtttttaaaggcaacatagcattctacagcagggttaatctattatcaagaacagtcaccctggttaataacaagttttactgatcagttgctggttggttggttggttggcatgtgggtgtgtgggtgtataggtgtgtgtgggtgtgtgtgtctattttaccccacacgtacctttatttaatgaagagggatggtaactatatcataagtctcaccatgacctgttataaatttctgatggaagctcgcgcagtatgggcctttgaaataccctgctgatgtcataggtcatattctcacatgagaactggaccaaagggcttgggctgaaactctgatgttgccactgtttgccaccttcaattggctgccc

SEQ ID NO: 2004 - DNA, 339 bp, Homo sapiens
ggaggataggcatgaaccaccatgacctgatgaaagaaatttttttaaaccaaactgttttacccaaaattttaatccagagctttcattagatgacatatcagagaaaataaagttgagccatataaacatgtctcttttagccagaaatataatttagattcaatactcttttataaactgaggttttattactatctatctcattactgaagtcctaaattaaagcaataagatctttgtgtgtgtatatatgttggatgtgttgacacataagtacatatgttatgttgtatgacttgtctatatagtaaattttggcatagttggccagaaatg

SEQ ID NO: 2005 - DNA, 343 bp, Homo sapiens
cacttcgggctcccaaagtgctgggattacaggtgtgaaccaccgcaaccgacttaacctcttttcattataaattaccgagtctcaggtatttatctatagccgtgcattaacacagtgtctggctctgtcacccagggagaagacagtgatgagatcatagctcaccactatggccttgacctcctgcactcaagtgattctcccaccttagcctcccaagacctgggatgacaggtgcccactgcacaactgggtaaattcttttttctatttaaacagcaggggtttactatgagacccagcctcgtctgcaactctggggtcaagtaatcataccgcg

SEQ ID NO: 2006 - DNA, 329 bp, Homo sapiens
tattcctagacaaaaaccttactattataaatatgtcaattctaaacaaattgattgataaattaaatataatgtcaatcaaaatcctaacagacttttttgaaactcaacaagcggattctaaaatgtgtatggaaaggcagaaagacaagaatagccaaggcactcttaaaaaagaagaacaggctgggcatggtggctcacacctgtaatcctagtaccttgggaggccaaagtgggaagatagcttgaggccaagaatttgagataagcctaggcaagacagtgagactctgtttccacaaaaatttaaaaactagccgggcatg

SEQ ID NO: 2007 - DNA, 332 bp, Homo sapiens
aattcacacacacccaagcagacacacactacaaaatatacatgcacatatgtaatagaaaaccctgtcttacatattattaattcccccaatttgtgaaaagacagttttttaattgtgaataattcagagttgttcttatggacaagtccatgaaaattgcttctactttttgttaactttcatcagcttttcatttctgctcttaattttctatggtcttaaaaaatacataaataaaccacttcaaattgtttccaaacaggctgggagaggtggctcacaccagtaatcccagtactttggaaggccaagacaggtggatcatctgg

SEQ ID NO: 2008 - DNA, 354 bp, Homo sapiens
ccctctgaagacttggagttctggatgggcctgagggtgggggaggcctgttagaagattttatttttttcgttttcctttttcctttttgtgcagaacggagtcgcactaagttgcccaggccggtctccaactcctgggctcaagtgaccctcccgcctcagcttcctgaagtgctaggaagtgagctatgatcgtgccactccattctggcctgggtgacagagtgagacccctgtgtctattttaaaaaggaagctagtggctgagcaccgtggcttacgcctgggatcccagcattttggcgaggtggggcgaaagcatcatttgaggtttgggaccattcctgccccc

SEQ ID NO: 2009 - DNA, 163 bp, Homo sapiens
cccaggagggttggccggacacagtggtagtggctcacacctgtaatcctaatgctttgggagcctgaggcgggaggaccccttgagcccaagaagtcaaggccacaatgggctatgatggtgccactggtcttcgggctgggcagcaaaacaaaaccctggc

SEQ ID NO: 2010 - DNA, 392 bp, Homo sapiens
ggcacgaggccagtcaggatggtttgctccagcacctgctaccgggcagagacaaacacgggacaggaaccccgggggctgtatcgagtacaccacttcaccaaggtggagatgtttggggtgacaggccctgggctggagcagagctcacagctgctggaggagttcctgtcccttcagatggagatcttgacagagctgggcttgcacttccgggtcctggatatgcccacccaagaactgggcctccccgcctaccgcaagtttgacattgaggcctggatgccaggccgaggccgctttggagaggtcaccagtgcttccaactgcacagacttccagagccgccgcctccacatcatgttccagaccgaggctggggagctgcagtt

SEQ ID NO: 2011 - DNA, 399 bp, Homo sapiens
cgttggctgtcgcagcccattcatgtccaccgaagtcttatcgtactacactactccatgtcatcgcatcccaccaggcatgccaacgcattcatccaggcgaccacccaggcatgtacccactcacctatccacccatccacctacctatttgtcacccatccacccatccatccatccaatcacccatccaaccatcaatccaaccattttcatctgatcattttcgatccatctacccgtccacccattcactactccatccacctacctatccatttatcagccatttacccatccatccatctatccatgcagatgtttattgagcacctgtgtgctgggtcctatttgggagccttgttaaccaccaagaccttcctaggccatattgtggta

SEQ ID NO: 2012 - DNA, 359 bp, Homo sapiens
actacgactgcgacatgacgacagacagggacgctgttagccacaccctcactcataagcagtgccgaaaaggcttcattcgagacctgtgggatggcattgctttaatcatagccataatacactgctataaaactgctttccacctcacgcgcactccttttatgtttcagcttcgcggctaggcaacttaagtcacttcctgtcttccgcctcaggctagagggcgagcgcttcgccgtgggacttcttctgcctggctccgcctcttgccccggaagtactcacagcgtacggttggtattgggcccgtttctgagcagcgcttcctttttgtccgacatcttgacgaggctgag

SEQ ID NO: 2013 - DNA, 344 bp, Homo sapiens
aggctgcagtgagctatgatcatggtactccattctggcctgggtgacagagtgagaccctgtctgtaataaagcaaacaaacaaaaacccttgaacaggaaaagctataataaaataaatggaagtaaacaatgatcaatgccaggcacggtggctcaggcctataatcccagcactttgggaagccaaggcaggaggatcgcttgggtccaggagttccagactagcctgagcagcacagcaaaaatctctaccaaaaaaaaaaaaccccagcccgggttaaggggttaacccttgaaatccaaccatttggggaggttgaggcggggggaaaaccggagga

SEQ ID NO: 2014 - DNA, 341 bp, Homo sapiens
gtctgacagcctaggtttaattataatcaataatctatcatcattaaactgttaataattatgtaagatttttggctctcacataagttaaactggcctgactagcaaatgcatgtaagtttttttaatatatatataactcagggcttcgcttttaattctaaataagtcattatggaaataaaatctatttatttagtagatcaagataatattctcagttgggcatggtggcacatctataatctcaactactcaggaggcaggtgggaggactgttggagcccaggagttcaagaccagactaggcaacatagtgaggccctgtctcattaaaaaga

SEQ ID NO: 2015 - DNA, 342 bp, Homo sapiens
atcattagattggagagccgccaaacacctaaactatatgaagctaaagtctgtttaagaaagagcccatccaggctgggtgtggtggctcatgcctgtgatcccagaactttggggggccaaggtgggtggatcatgaggtcaggagatcgagaccatcctggctagcatggtgaagccccgtctctactaaaaatacgaaaaaataattggccgggcgtggtggcgggttcctgtggtcccagctactcaggaggctgaggcaggagaatggcatgaacccaggaggtggagcttgcagtgagccgcgattgcgccactgcactccagcctgggcgacag

SEQ ID NO: 2016 - DNA, 340 bp, Homo sapiens
agcctgggcaacagagtaagactctgtctcaaaaaaaaataaaaaaaaaaaaagggaaagaaaaaccccaattgataaatttaccaaaaaaggacattaaccggattttactttacttatggccaaaagggaaaaaaaaaacataggctttaagggaaaacttgattgttgtaaaaaaaattaaaaaaaggccaaataaaacttttagggataaacccggccggggggggcccatccctgaagccccacctatttgggaggctaggcggaaaaattgtttaaacccaggaggggggggttacaaagagcggggatcggcccattgcactccaccctggca

SEQ ID NO: 2017 - DNA, 275 bp, Homo sapiens
ggcagaaatcaaaagcaccgaccagataggaaaaaaacagacaaattagacttcaacaaaactaaacattcgtgctcctcaagaggaacttttaggccaggcgcagtggctcatgactgtaatcctagcactttaggaggccggggcgggtggatcacgaggtcaggagttcaagaccagcctggccaagatggtgaaaccctttctctactaaaaatacaaaaattagccgggcccagctgggtgcggtggctcacacctgtaatccttgcact

SEQ ID NO: 2018 - DNA, 316 bp, Homo sapiens
agggtttatcacatgggtagactcaagtacccatgtgataaaatgtcacagaactatataccaaaacaaatagacaaaaagagtgcacgtatatcctggcgaaatccaaataatatctgcacctgagttaacagtattattgcatcacagtcacttttctggctttggccatttactatggttatataacattattattggaagaagttagctaaagagtatatggggactttatactataatttttgcaactcttgtgtagtctctaactgggtagtgtgaaatagttctgccacctctgacgcaccactgtcaa

SEQ ID NO: 2019 - DNA, 312 bp, Homo sapiens
ttcatgaggggctgatctggctttggggtggtattaattgttttttttttcccctttttttttaaaaggggaactggcggggttgccaaggcgggtctcaaactttggggctaagggggcctccccatcccacctactcggggggttgagccaggaaaatccttcgaccccggaaggcaaaggtggcaagggcccacaatggtcccacggccctccaccctgggggacaaaccaaaattccctctcacacaacgagagaaggaaaactaaaggaaatcccccggaaacccccgtgaaaggccggaaagcccc

SEQ ID NO: 2020 - DNA, 329 bp, Homo sapiens
gcacgcacacacacacacacacacacacacacacacggtattgaaactagaattctttcaatggtgtattccccatacttatttatgtctcaaagactgatcttcaaagaagacagagacttccagtgtaagacagttgaaaatatttggctgtgaccagcaacaaaaggcaaacaagtgtcaaaaaggtctttgctattgtaaggagattctcttttactgatctaaacaaaaggctcttctcacttctctatttcccatcctggcgcattaaccatttatatttaattaagcccttcttatatttctcaaacagcagtatttatgct

SEQ ID NO: 2021 - DNA, 375 bp, Homo sapiens
  misc_feature (1)...(375): n = A,T,C or G
gagaattgcttgaacccgggaggcagaggtggcagtgagccgagattgcgccactgcactccagcctgggtgacagagcaagactccatctcanaaaaaaaaaaaaaaagaaaaaaaaaaaccccggccccggaaactaaaccctgaaacccaagaatttgggggggccggggggggggaataacaaggcggggatttaaaaaccacccggtttaaggggaaaccccatttttaataaaaaaaacaaaaataagtggggggggggggaggccccctggatccccaattcctcggaaggctggggcaaaaaaatccttgaaccccggggggcgggggtttcagagacccaaaatggccccattgaactcaagtggg

SEQ ID NO: 2022 - DNA, 382 bp, Homo sapiens
cgttgctgtcggtgaaccaccgcgcctggttgagataggttgttttttgaattaactattcttttttttttttttttttttttggaaaaaaattttcttttttttcccccacctggggggcaggggggcaaagataaaagttaattggaacctttgcctcccaggttaaagggattccccggctttaatttcccaaggcggggggattaaggggaggggcccttacccccgggtgttttttttttttggggaaaaacggggtttttcctttggggcaagggtggttttgggttccccacccggggggaataaccttttttggccccccaaaggggggggaatataggggggggccctgggccccaaccttttttttaaaatt

SEQ ID NO: 2023 - DNA, 349 bp, Homo sapiens
gcgcgcaggctgcgcatgcgcgccggcgaccacacctaaatagccgcagcctctgcgcgtcgccctccacggttaccccggctctccgcccctccttctcgcggggctcgagggaccatggccgatcctcgcgtgagacagatcaagatcaagaccggcgtggtgaagcggccggacaaagaatatttgctgatgattttctaggcatacatgttgtggaatccattgtaaaatggaccttggtgccgggtgagtataggaataaacccggctgaaaaaatacgtggcttaaaacatgtctgtttagtttagacgggtcgaatttcaataagctctttctggggtctcc

SEQ ID NO: 2024 - DNA, 349 bp, Homo sapiens
actacttgctatgtatgttcccctagctgcatttgaacccctgggttcaagtgatcctcccacttcagcctccccggtagctgggactataggtgcatggcaccgggcctggctgttcactcctcctttcataagcaaaggcacagtttcttttcttgtaagagatgggctaggttgtgtagattgagctttctaataaaaacaactaaaagtgttgaataaaaatgtcttaaaaacatcgaaaagttaacacggtagaaatgaaattgggaactcagataagctgaacgtggaaactgcttttgccttgcgaacatttgctcaactaagtgaacttgaactttggttt

SEQ ID NO: 2025 - DNA, 352 bp, Homo sapiens
  misc_feature (1)...(352): n = A,T,C or G
actacttgctatgtatgttcccctagctgcatttgaacccctgggttcaagtgatcctcccacttcagcctccccggtagctgggactataggtgcatggcaccgggcctggctgttcactcctcctttcataagcaaaggcacagtttcttttcttgtaagagatgggctaggttgtgtagattgagctttctaataaaaacaactaaaagtgttgaataaaaatgtcttataaacatcgaaaagttaacacggtagaaatgaaattgggaactcagataagctgaacgtggaaactgcttttgccttgcgaacatttgctcaactaagtgaacttgaactttgggtttgn

SEQ ID NO: 2026 - DNA, 346 bp, Homo sapiens
ggcactggaggaagataactcaaaataagaggcagctatgacaatcccacagcaaacatcatactgaatgggttaaagctggaagcattcctcctaaggactgaaagaagacaagaatgttcactcacaccatgcttattcaacatagcactggaagtcttagccagaacaattagtcaaagaaagaaatagacatccaaattggaaaaaaggaagtcaaattatctctcttcactgacgatatgattctatacctagaaatactaaagattctgccaaatctcaggatacaaggattagcttacaaaagttaatagcatttccatacaccaataactaagctgag

SEQ ID NO: 2027 - DNA, 347 bp, Homo sapiens
  misc_feature (1)...(347): n = A,T,C or G
gctcttcaagtaaatactactgatttgtcaccaaaggaggtcaactccaaggaaagctttgcatttaaaccagaaaatatctcagaagaaaatgcaacccacatatttattgccattaaaagtatagataaaagcaatttgacatcaaaagtatccaacattgcacaagtaactttgtttatccctcaagcaaatcctgatgacattgatcctacacctactcctactcctactcctactcctgataaaagtcataattctggagttaatatttctacgctggtattgtctgtgattgggtctgttggaattgttaactttattttaagtaccaccatttgaacctn

SEQ ID NO: 2028 - DNA, 389 bp, Homo sapiens
cgttgctgtcggtcggagagccagcggactctgacaagcgtcatgccagtgacttcgccctgtggaaggcggacaaaccccaggaggtgttctgggcctctccctggggacccgggaggccgggctggcacatctagtgctctgccatcgctagtatggtatttggaagtcaactggatatccattcaagtgggatagatttagcttttccacatcatgagaacgaaattgcacagtgcgaagtctttcatcagcgcgagcagtggggaaattattttctgcattctgggcatttgcacgccaaaggcaaagaacaaaaaatgtgccaatcattaaagaactacgttactattaaggactttctgaagaccttttcccccgatgtctta

SEQ ID NO: 2029 - DNA, 189 bp, Homo sapiens
  misc_feature (1)...(189): n = A,T,C or G
gacccactacctaaaaaatcccaaacatataactgaactcctcacacccaattggaccaggnnggaagnnaaaagaaaaaggaaaagggggcggtttttttcggaaaccccaacttggaaaaaacctttgggggggtgggcacacccccattttaaggggggggaaaaaatttttttttttgggaattg

SEQ ID NO: 2030 - DNA, 215 bp, Homo sapiens
  misc_feature (1)...(215): n = A,T,C or G
tacggttgctagaggacgacggatgggctgatgccaatttttctgggagagcccactttaaaaccccctataccagaggagctacctaagaacaggtttcnagagcacaccccgtctatgtactcacaatagcggggagaatttataggttgaggctgacaaaccttcccagcctgggggatttctgggtttgccaaaatagaactcttagttcn

SEQ ID NO: 2031 - DNA, 390 bp, Homo sapiens
  misc_feature (1)...(390): n = A,T,C or G
cggtttataaaagccttgggttccaaccaggcagtagatgtgcttctgaaccgcaaggagcaaacactgaaataaaatagtttatttttcacactcaaaaaaaaaaaaaaaaaacctccgggggccgttttttccgtaaacccaaacttgaaaaaacccttggaggagttgggccaacccccacctaaagggcggggaaaaaagggcttttttggggaaattggggaggctttggttttattggaacccattataggcggcaaaaaacaggtaaccaccaccaatggctttctttttatgttccgggttcgggggggggggggggggtgttannccccccccccccncccccccccncccccccnccncccnccaccccncccccccccn

SEQ ID NO: 2032 - DNA, 394 bp, Homo sapiens
cgttgctgtcgcacggttttgttttgttgcccaggctggagtgcaggggtgcaatcgaagctcactgcagcctcgaccacctgggctcgggtgatcctcctgcctcagcctcccagtatctgtggccacaagcacaccccaccatgcccatttaattttttaagggatttcttgtacatatggggtctcactatgctgcccacgctggacttgaactcctggccaccaaggggagctcctatctcggactccggaggggctatgattacccgtagatagacatttactttaggaagaggctcttaaaggcaataaaacgcttcccatccaagagaatcacgctgcaatcctgggccacagagctttttaaaaaatcgatgcctgaccttcaacg

SEQ ID NO: 2033 - DNA, 404 bp, Homo sapiens
  misc_feature (1)...(404): n = A,T,C or G
tacggctgctacaatatcacagaagggctggtcttgaactgctgggctgaagggatcagctggtcttggtctcccaaaaggctggggttacaggcatgagccatggtaccccgccaagtgaactattaatacacacaacctggatacatctcaagagaattatgctgagtgaaaaaacagacaacacacatacggccacctaatttatgactaagggatactgcagccaactaaaggaagttatcttcaataaatggtgctgtgtcaactgaatatacatatagaagtatataaatcttgatttctacttcgtataaacaaaaaagatctaatttctaattatagacctcataaacttaaggaagaaacaataaaacttatggaagaaaacatacgagaatatn

SEQ ID NO: 2034 - DNA, 353 bp, Homo sapiens
  misc_feature (1)...(353): n = A,T,C or G
ctggatgtcagcaagaatggaatacaggagtttccagaaaatataaaaaattgtaaagttttgacaattgtggaggccagtgtaaaccctatttccaagtaagttctcaggctccctgatggattttctcagctgttaaacctaacccagttgtatctgaatgatgcttttcttgagttcttgccagcaaattttggcagattaactaaactccaaatattagagcttagagaaaaccagttaaaaatgttgcctaagtaagtaaaggtgctattctttaaaaaacttaatttataatttttaatgattaagtctttanaaatgtaaatttttattacctanaatgtggtgcg

SEQ ID NO: 2035 - DNA, 367 bp, Homo sapiens
gtgcgtccgtcgattgagatttgacgacagacagggtcccgtgtgttgctgccacagctacagttcagtgacaagaaagctatatctgtaatggctgtgatgcgattgctttatttgttgcctgtattctctgcactttgcgaaccgacgccgacagttgcattgatttcatgatttaggtaccgaccaaggtgtgcgaagttcaggactctgtctctccacccctcatataaaagaaaaaaggaaaggcatgactctgagggtaattctaggaaggcatgtggggtgggaaaaggagccagcggtgtgattaaagaatgacatggtactagagggatgcagatctagataatattgaaaggccagg

SEQ ID NO: 2036 - DNA, 382 bp, Homo sapiens
  misc_feature (1)...(382): n = A,T,C or G
tacggttgcgagaatacgacagaagggctggatgtcagcaagaatggaatacaggagtttccagaaaatataaaaaattgtaaagttttgacaattgtggaggccagtgtaaaccctatttccaagtaagttctcaggctccctgatggattttctcagctgttaaacctaacccagttgtatctgaatgatgcttttcttgagttcttgccagcaaattttggcagattaactaaactccaaatattagagcttagagaaaaccagttaaaaatgttgcctaagtaagtaaaggtgctattctttaaaaaacttaatttataatttttaatgattaagtctttaaaaatgtaaatttttattacctanaatgtggtgcaan

SEQ ID NO: 2037 - DNA, 386 bp, Homo sapiens
cgttgctgtcgggaatgcccttggcagcctgcccaaggaagctgccaggcagaactatgtggatttggtgtccagtttgagtccttcattggaatcctctagtcaggtggagcctggaacagacaggaaatcaactgggtttgaaactctggtggtgacctccgaagatggcatcacaaagatcatgttcaaccggcccaaaaagaaaaatgccataaacactgagatgtatcatgaaattatgcgtgcacttaaagctgccagcaaggatgactcaatcatcactgttttaacaggaaatggtgactattacagtagtgggaatgatctgactaacttcactgatattccccctggtggagtagaggagaaagctaaaaataatg

SEQ ID NO: 2038 - DNA, 323 bp, Homo sapiens
aggtaactgaatccaacaacatatcaaaaagataatccatcatgtgatcaagtgggtttcataccagggatgcagggatggtttaacatacacaaatcaataaatgtgacacaccacataaacagaattaaaaacaaaaatcacatgatcatctcaacagatgcagaaaaagcattcaacaaatccagcatccctctatgattaaaactctcagcaaaattggcatacaagggacatacctcaatgtaataaaagccaacagccaacataatactgaatagggaaaagttgaaaacattccctcttagaacttgaacaagaca

SEQ ID NO: 2039 - DNA, 319 bp, Homo sapiens
  misc_feature (1)...(319): n = A,T,C or G
gtatacctggactttatagaaagtattaaacttgtatctattactttataaagcagggcactgaatatattgagagagaataccagctagaaactttaagaatataacatctttttggaaacaacaatgtttatttaaacaattatttaccatgaccaagtggtatttatcccaggaatgcaagggtggttcaacacaagaaaatcaattgatgaaatatatcacattaatggaagaaaaaacatatatatcatctcaactgatgcaaaaaatatatttgacaaaattcagcactctatcagaaaaacctttagaaaan

SEQ ID NO: 2040 - DNA, 386 bp, Homo sapiens
cgttgctgtcggcttcctaaccatcgagattaccagcaatgtgcagtacctgaaaagcaggatattatgaagaaactgaaggagattgcattcccaaggacagatgaattgaaaaacgaccttttaaagaaatataacgtagaataccaagaatatttgcaaagcaaaaacaaatataaagctgaaattctcaaaaaattggagcatcagagattgatagaggcagaaaggaagcggattgctcagatgcgccagcagcagctagaatcggagcagtttctgtttttcgaagatcaactcaagaagcaagagttagcccgaggtcaaatgcgaagtcagcaaacctcagggctgtcagagcagattgatgggagcgctttgtcctg

SEQ ID NO: 2041 - DNA, 359 bp, Homo sapiens
attctccgtattcaccttctgtctctccagtttgggggcagctgtttgacctgtgacttaacttctcttacagatctaagaaaagttgttgatttttcagtttgtttagctttttacttgctcttaagattgagtgacagatttttttttgcatttttttattgcgataaaatgtattaatacaaaacatttatcatttacgtgtacagttctgtggcattagatacattcacactgtgcaattaggactcttaaaaggaaaaagtcacatactgttagaagggtcatacaaggctttatagaaaggatttttaagatgagcttctatatatcaattaggagaacatttcagtagaact

SEQ ID NO: 2042 - DNA, 354 bp, Homo sapiens
atacaaaaaattagccaggggtggtggtgcacacctggagtcccagctactcaggaagctgaggtgggaggatcacctgagcctggggaggtcaagactgcattgagccatgatcctgccactgcactccagcctgggtgacagagcaagactccatctcaaaaaaaaaaaagcaggtaaaaaaaaattttttttgtataaagccaaaaatatataaaagggcaaaaataggcggggggggggggctacccctgaaaccccaccattttggaaggccagggggggcaaatcacgaggccgggaaattgaaaccatcctggttaacagggggaaaccccggctttactaaaaaaa

SEQ ID NO: 2043 - DNA, 402 bp, Homo sapiens
  misc_feature (1)...(402): n = A,T,C or G
ggcacgagaggggctggatgcctttcatcccaactattctctgtggtatgaaaaagaaaaaaaaaaaaaaaaagggatccgggcccggccgggggggttcacccctgtattcccacctttttggaaaaccaagtcgggcattcttttgaagtcgggagttaaaaaccacccggcccaactggggaaaagcttgttttttttaaaaaaacaaaatttacccggccggggggggggccccctgtattcccaggtttttggggggactgaaacagaaaaatcctttcaccccggggggggggggttgcataaattcaaaagggcccccttgggctccaccctgggggacaaagcgaaactccttttaaaaaaaaaaagggatcggccaaaaaacccccgggggtn

SEQ ID NO: 2044 - DNA, 331 bp, Homo sapiens
tgctggccacaccagccccctttcacctccagtgccacaataaacctgtacccagctgtgtcttgtgtgcccttcccctgtgcatccggaggggcagaatttgaggcacgtggcagggtggagagtaagatggttttcttgggctggccatctgggtggtcctcgtgatgcagacatggcgggctcatggttagtggaggaggtacaggcgagaccccatgtgccaggcccggtgcccacagacatgaggggagccactggtctggcctggcttggaggttagagaagggtagttaggaagggtagttagcatggtggctcatgcctgtgg

SEQ ID NO: 2045 - DNA, 313 bp, Homo sapiens
  misc_feature (1)...(313): n = A,T,C or G
ttgtttgcagaataaacttcagtgttatactcggcttaatcatttgcatcaagtgtaccaagaataattattttcacataggcttttaaaattggctctgatggaattctattccatacggaatctcagataagactgtttttttttgagttggagttttgctcttgttacccaggcttgagtgcagnnncnnnnnnntnnnttantnnnnnctnnnccttnttnactcaattgatcctcccacctcatcctccccaataacttttacancctttccataccaccactcctttttaatttaaaaaaaaatttt

SEQ ID NO: 2046 - DNA, 324 bp, Homo sapiens
aggctggtgtgcactggtgcgatctcggatcactgtaacctctgcctccagggttcaagcaattctctgcctcagcctcccgaggagctgggattataggcgcccaccaccatgccccgctaactttttgtatttttagtatagatggggcgtcaccatcttgtccaggccggtatagaacttctgtcctcctggggacccaaaatgggctcctaaaaaaggaggtttgggacctgatgtccagggctttttgaaggtgtgggactgccgcgccccccctccacccgggccagtatttttgtttaaaaatataaacggtgcgcc

SEQ ID NO: 2047 - DNA, 398 bp, Homo sapiens
ggcgggatggaggcggcggccgagcctttatattttgtccggcgtcaggcacatcatcctggtcctgtcaggaaaggggggcgttgggaaaagcaccatctccacggagctggccctggcactgcgccatgcaggcaagaaggtgggaatcctggatgtggacctgtgtggccccagtatcccccgcatgctcggggcgcagggcagggctgtgcaccagtgcgaccgcggctgggcacccgtcttcctggaccgggagcagagcatctcgctcatgtctgtgggcttcctgctggagaagccggacgaggccgtggtgtggagaggccccaagaaaaacgcgctgataaagcaggttgtgtccgacgtggcctggggggagctggactacctggtgg

SEQ ID NO: 2048 - DNA, 360 bp, Homo sapiens
actatcgattgcgagacgacgacagacggggatcagtctgttcctaccacacttctggggccataacgaaatggctgcatgagtgaagactgtgatgctatcgctctataccaaaccattatgatctgcaataatctggttagcaaccacagttgcgttcattttgtgttttatggtactaggggtggcgtggaaagatcacgataacatccagaattggcatctcttctttacgtttagatgaactagaggagcgcgagcatacacattcaaaagctagcagaaggcaagaaataactaaaatcagagcagaactgaaggaaatagagacacaaaaaacccttcaaaaaattaatgaat

SEQ ID NO: 2049 - DNA, 313 bp, Homo sapiens
ccaaagtgctgggattacaggtgtgagcaaccacaccccggcctcatgctataacttttttttttttttttaaaaaaagcctcactttgtacccaaggctgaagggggtaggggaataaagggggttaattgaaacctttgcctccggggttaaaggaattttccggcctaaccctcctgagaagctggaactacaggggcctgccaccaacccgggttaatttttttgttttttaagaaaaaacggggtttaaccacgtgtggaaggcgggtttcaaacaactgacctcaggggatccacccacctgggcct

SEQ ID NO: 2050 - DNA, 352 bp, Homo sapiens
actgtggatctgtccccaggtttggctgggggtttggtttttagtagagatgaggtctcactatgttctcaaactcctgggctcaagtgatcctcccaccttggccccctaaagtgctaggattataggtgtgagccactgcatttgggcgccgtgaaaagctttgagaaggctaacggaaaagcaagggagagccctgggcacacagccccctcgaggaggcaggtagggccccacctcacggtgtgggtcacagagctttactccctgcatttccagccatgaggggttgggggccatccacccatcagatactggttaggaaggtgatcacggctcagtgcaagggact

SEQ ID NO: 2051 - DNA, 352 bp, Homo sapiens
actgtggatctgtccccaggtttggctgggggtttggtttttagtagagatgaggtctcactatgttctcaaactcctgggctcaagtgatcctcccaccttggccccctaaagtgctaggattataggtgtgagccactgcatttgggcgccgtgaaaagctttgagaaggctaacggaaaagcaagggagagccctgggcacacagccccctcgaggaggcaggtagggccccacctcacggtgtgggtcacagagctttactccctgcatttccagccatgtgggtttgggggccatccacccatcagatactggttaggaaggtgatcagggctcagtgcaagggaag

SEQ ID NO: 2052 - DNA, 275 bp, Homo sapiens
  misc_feature (1)...(275): n = A,T,C or G
ctcatcatggtaaagactttatatgaaaaattcacagctaacatcacattcaattatgaaatgatgaaagcatttcccctaagattaataacagggcaagggtgtctactatcctcacttatatttaacataatattgaaagttctagccagagaaattgggcaaaaaaaaaaaaaaaaaaaaattgggggggggttttttcggaaaatccagcctggaaaaaatccttggggggtgtgggccccccccccttaggagggggggaaaaaagggtn

SEQ ID NO: 2053 - DNA, 384 bp, Homo sapiens
gaagacttacttaccctaagtatatatgcacccaacattggagctcccaggtttataaaacaattacttctaaacccaggaagagacttagtcacacaacaacagtgaggaacttcaataccccactgacagcattagacagatcatcaagttataaaactaacaaagaaattctggacttaaaaattgaacacttaaccaataggaccttataaatatataaagaatattccacccaacaaccacagaatataaattattcttatctgcacatgaaacgtactctaagatcaaccacatattcattcataaaaaagcctcaataaattcaaaaaaattgaaattttaacaagcatattctccaaccacaggggaattaaaata

SEQ ID NO: 2054 - DNA, 332 bp, Homo sapiens
tgtgtggtggcggcaccgctcacaaacacccccactccggccgcccgacagtctgaacagctcagagttgaaccggcagcgtcgggcatgctggttgcaggagcaggctaggagcaaaatggggtgggggcgcatcagggccgagtgtgctgctccccagtcctcagctttcttcccatggccctgccctcatgaaaggaagccgtgagtgtccaaggtagaagagaatgcctgggtcccaggacacctctattattatctttttttttgagacggagactcactctgtcacccaggctggagccgaatatttttttgccaattctgttacg

SEQ ID NO: 2055 - DNA, 387 bp, Homo sapiens
  misc_feature (1)...(387): n = A,T,C or G
cgttgctgtcggtctgatgttggcctagggaagggacggtactacagtgtaaatgtgcccattcaggatggcatacaagatgaaaaatattaccagatctgtgaaagtgtactaaaggaagtataccaagcctttaatcccaaagcagtggtcttacagctgggagctgacacaatagctggggatcccatgtgctcctttaacatgactccagtgggaattggcaagtgtcttaagtacatccttcaatggcagttggcaacactcattttgggaggaggaggctataaccttgccaacacggctcgatgctggacatacttgaccggggtcatcctagggaaaacactatcctctgagatcccagatcatgagtttttcacagcn

SEQ ID NO: 2056 - DNA, 381 bp, Homo sapiens
tgggacaacaggggctcaccaccacacccagctagttttttctgtagttttattagagaagtggttttatcgtgtaggccaggggggtctcaaacttctggtctcaggtgatccacccatctcagccttccaaagtacttggattacaggagtggccaccacgcccaacctacacatagctctttttttttttttttttcaagaaaaaaatttttttttgtcccccaggtgcaggaagatggtttttttgggtacaccagaatctttttttccagggtttaagccagtatggaggccgatatctttgggtgcgcggggtatacacacgaactgtccaaacccggtgtgattgttggtcttacaaaagatgctggagcatat

SEQ ID NO: 2057 - DNA, 399 bp, Homo sapiens
cgttgctgtcgacggttttcctgccttagtctccctagacgctgagactgccggcatgtgccaccacgtccagctaatactttgcgcttctagaagacatggggttactccctgtatttgaggctggtctgagagctcctgacctatttggaccagtccacctctgcctcccaaagggctcggaaacaagcgtcgatccttctatgcctgaccgacaaccttatgtcttagcctgagttcctcagccttaatgtgagatcctcaaactgttgacatactaattaatatgtatctactgagactgagaaagacactaatttctttctaaatcatgaagatttactgattatcttatatgtaaaacattttagcctatatgttggaatctggagccaatga

SEQ ID NO: 2058 - DNA, 335 bp, Homo sapiens
tggaaccagcaaagcatgaaaggtttaagacacttcatcagttgggttttcttgccttgaaaaagggggaatagaaaatgatttggtaagcactccctctttcacttcctttggaagggattgggcaaaataagtattatttcctcctcatatacgtagaattagtttttttggttttttgtttgtttgtttttgagacagagtttttgagactctgtcacccaggtgggagtgcaaggtcgcgatctttgctcactggtttctctgcctcccaggtacaagcgatttttctgtcttatccccctgagtatctatgaatgatatttgtctgccct

SEQ ID NO: 2059 - DNA, 336 bp, Homo sapiens
  misc_feature (1)...(336): n = A,T,C or G
ggattccttaaaccttgagccttggaggttgaggctgaagtgagccaagatcacaccactgcattccatcctatgtgacagagtgagacactgtctccaaaaataaaataaagatttaatcaaaataaaatatggtacataaaaatcaaggaagaccatgtggccatataaaaacacaaagccaggcactgtggctcatgcctataatcccaacactttgggaggctgacgcagatggattacttgagatcaggagttcaagaccagcctggccaatatactaaaaccccgtgtctactaaaaatacaaaaaatcagctgggcgtcgtggcaagtn

SEQ ID NO: 2060 - DNA, 172 bp, Homo sapiens
  misc_feature (1)...(172): n = A,T,C or G
cgttgctgtcgggcttggcttcagtgaacgcaccgtgatgtgcaggccgggaggtataggcaggctgatgggggaggtgtgggaggtttttcnacacctngcaccaaatgctttatctactgaagctgcgatgctctagctatattcaacaccattattcgttacattatat

SEQ ID NO: 2061 - DNA, 322 bp, Homo sapiens
gggcaatcttttcggattctcttccatgctgtggcaggtgagcctcatccaatttgtgaaagcctgaatagaacaaaagtctgaccctccgctgagtaagagagaattcttcctgcctgaatgccttcacactgagatatgggtttttgtcctgttttcagagtagaaccaaaacattggctcttcctggaccttcaacctaccagcttttgaactgaacctacaccattggctctcctggttctcatgccttcaaattcagactgccaatatcatactgaatgggcaaaagctggaagcattccctttgaaaaccaacaca

SEQ ID NO: 2062 - DNA, 295 bp, Homo sapiens
  misc_feature (1)...(295): n = A,T,C or G
gctttgcatctgaaactgtcagccccagaatgttgacagccgctctcctagcccttctctgtgcctcagcctctggcaatgccattcaggccaggtcttcctcctatagtggagagtatggaagaggnacntaanctcttgggagctctatggccctgcccattggctgacaaacccacatatgtatccaggtgaccttaaggcaagcttgtatcagctgatgatctcttaaaagtgctaccttctggctggaggataaccaacaactagcacaaccagcatttcgagaaaaccc

SEQ ID NO: 2063 - DNA, 317 bp, Homo sapiens
  misc_feature (1)...(317): n = A,T,C or G
gggcaatcttttcggattctcttccatgctgtggcaggtgagcctcatccaatttgtgaaagcctgaatagaacaaaagtctgaccctccgctgagtaagagagaattcttcctgcctgaatgccttcacactgagatatgggtttttgtcctgttttcagagtagaaccaaaacattggctcttcctggaccttcaacctaccagcttttgaactgaacctacaccattggctctcctggttctcatgccttcaaattcagactgccaatatcatactgaatgggcaaaagctggaagcattccctttgaaaaccn

SEQ ID NO: 2064 - DNA, 374 bp, Homo sapiens
actcagcgtggtgtcacgtgcctggaatcccaactactccggagggtgaggcacaagactcgcttaaacctgggaggcagaggttgcgtgagccgagaacatgccactgcactccagcctgggcaagagagtgagactctgtctcaaaaaaaaagtttatatttatatacacacatatatttatatactcacacacacacgtgcacacacttaaaaatgccaagaaaaaaattgtaccaaacaatcatgatctgaatcatgaagcaaattaaaatgtggcatgattttgaacaagtgatggagaatacaaaaagatttgattgtgtaaaagggttatgatttgagattggggaggaaaaaaaacataatccctg

SEQ ID NO: 2065 - DNA, 324 bp, Homo sapiens
aatcccaacactgggcagctgaggtgggtggatcacttgagcccagaaggtcgagagaccagcctaggcaacatggtgaaaccccgtctctactaaaaattcaacaataaaaaaattagctgggcgtggtggcaaggacctgtggtcccagctactcttgggggctgaggcgggaggatcaattgagcctgggaggtcgaggctgtggtgagtggtgaccacaccacttcactccagccggggtgacaaaacaagaaaacctgtcacctttctgggggaccctggtttccctggggtaattcaaaaaatcttcccaaaagggag

SEQ ID NO: 2066 - DNA, 394 bp, Homo sapiens
cgttgctgtcggaaaacaaggggttagatgttgcatttcataaaactaaccgaagttctgtctactgatgcagcacaagagatgtaaaaaaaaaaaaaaaaaaacccccccccccggggaaaaacccttttaaggtttggtttggttttttttttggggttgggtttttggtttttttaccccagggaaaaacctggaaaaggggcaaaacccctttccgggttttttttttaagggcccttttctaaaaaatagggtcaaccgggaatggaaaaagggggggggggggggaaaaaaaaaaaaccttgggggttaggggtttaaaaaaaatttaggcccattggttaaaaaaaccgcaactttaaaaaaaaaaaaatcccccccccaaccaacc

SEQ ID NO: 2067 - DNA, 289 bp, Homo sapiens
tgctaaaagtacattgaagatagattgccccatccaacctcctacatcaagggtaaacaaactctttctgtacgggccagatggtaagtatttggggctttgtgggccatatagtttctgttagatctactcagtgctgccattgtagtgcaaaagcagccacagacaatatgtaaacaattgaatgtggctgttttccaataaagtgttatttacacaaccagattttaccggtgggttatagtttggtgaatcatgtcctagatcatcattaggaagtggcatggtg

SEQ ID NO: 2068 - DNA, 339 bp, Homo sapiens
gtgggttttgtcattactttcaacgggaaaattgcaattacttttgtaccaacttatcatatgaaaaacatatttttaatatcttaaaaacttgagcctgccatacaaaattgtgtgtgtgtgttgtgtgtgtgtgtgtgtgtgcgtgagtgtgacttaagatcatgattttattaccacactgggcatcattgttaagccccatcttcactaacagtacacaattagccccgtgtagaggtggctgccagaaatcccatcctactaaggaggttgagtgaagagaatcacttgaacctgggatgcaaatgaaacagtgagtctagatcgtgcgactgg

SEQ ID NO: 2069 - DNA, 326 bp, Homo sapiens
tatttgtataatcgctgataactttccttgctttcaagtctgccccaactgaaatgaatacaggtactcctgctttcttttgattagggttagcatggtacatctttcctcacccatttatttttcatctatatgggtttttatatttaaaatgagttccatctcttcatgataaaaactgacaacaaactaggcatcaaagaaatatatctgaaaataataagagccatctatgacaaacccacagccaaacccacatcatactgaacaggcaaaagctggaaccattctccttgagaactggaacaagacaaggatgtgtattc

SEQ ID NO: 2070 - DNA, 132 bp, Homo sapiens
  misc_feature (1)...(132): n = A,T,C or G
cgacagaagggtaaatgggattacttttatttctttttcagattgtccacctttggtatatataaatgccactgatttttgtatgtcaattttgtatcctgtaactttactgaatttatcagttccaatagn

SEQ ID NO: 2071 - DNA, 183 bp, Homo sapiens
gctaacaaaacacgtacaggatctctatgctaaaaattacaaaacgttgatgaaaggactaaaagaaaacctaaagaaatggagagggatactatgttcatgttttgaaagactcaatgtagtaaagatacagattttccctaaaccaacttataggtttaattcaatacttatcaaaatctg

SEQ ID NO: 2072 - DNA, 376 bp, Homo sapiens
gcgggcggatcacctgaggtcaggagttcaagtccagcctcgccaacgtggtgaaaccccatgtctactaaaaatacaaaaaaaattagccagacatggtggcgggcacctgtaatcctagctacccggaaggctgagacgggaatcacttgaacctgtgaagcagaggtttcagtgagtctagattgcaccattgcactctagcctgggcaacagaactagaccccatcttaaaaaaaaaaaaaaggtgatccccaaaaaagggggtttttctaaatcttagtggaaaggccaccatgattaaagtatacaaactttttgaagcaaattaaatttttatttcttttaatccaaagtttaaatttgaattaaaccc

SEQ ID NO: 2073 - DNA, 438 bp, Homo sapiens
tctctttttgaggatcccatcgcctctaattccgttgctgtcgggcacacacctgtagtttcagtttctcaggaggctgacgcgggaggattggcttagcctgtgaggtggaggccacagtgagctgtgattgcgccactgtactccaccttgggagacagagtgagaccctgtctgaacaacaaaaaagaattgtggccagtcatggtagctcacatctgtaatcccaacactttgggaagctggggcgagtggattgcttgtggttacgaggtcaggatcagcctaggcaacatagcaaaaccttgtctctctaccaacaagaaaaagaaaaagaaaaaaaattaaccaagtgtgatggagcacacctggtggaaagccctaactactcggggaggcttatctgggaggaataattggagccccagaggttttggg

SEQ ID NO: 2074 - DNA, 376 bp, Homo sapiens
tacggctgttagaatacgacagaagggagcaccttgggaggccagaggcaggaggatcacttgaggccaggagttcaagaccggcctgggcaacataatgagaacccatctttaccaaaaaaataaaattacattaaaaattagctgggcacggtgacgtctgcctgaggtcacattcaagaagctgatgtgggaggatcgcttgagcccaggaattggaggctgcagtgagctaagatcataccactgcacttcagcctgggcgtcagagtgagaccctgtttctaaaataataataattttaaaaaatgatatttatggttgcattgggaaaagatcaatctattaatatatgtgaagacatttttggcctaaa

SEQ ID NO: 2075 - DNA, 367 bp, Homo sapiens
  misc_feature (1)...(367): n = A,T,C or G
tacctacttcgattgcgacatgacaacatacagtggtgtgtttacccaagccacgacttaaaggcagaggacaagatgctatatttgtgaaatgagacatgctatggctttattagataccgtactctgctgcaagaccacaatgtacgcatcgacggtggccttcattttatgttgcagaatgaatccgacgtataggaagtctttcangatattatccaggagaacttccccaacctagcaaggcaggccaacattcaaattcaggaaataaagagaacaccacaaagatactccttgagaagagcaactccaagacacacaattgtcagatttaccaaggttgaaatgaaggacaaaatgttaa

SEQ ID NO: 2076 - DNA, 331 bp, Homo sapiens
  misc_feature (1)...(331): n = A,T,C or G
ggtaccactagaaaaatccacccaaattaataagagaaaaagaaacaaagaatacataaagcaagaaaacaaccatacgacagaaacaaacctgtcatataatcgcctcaaatgcaaataggttaaatgctccagaaacagaacggctgaatatattttaaaaacatgatccaactaaatgctgcttacgagaaactagccttgtcagtaaagacacatatgaaccgaaattaaagggatggaaaaaaatattttgtacaaattggaaaccaaaagtgaccagaagctacagttatatcagataaaatagactttaagtcaagaaaggtan

SEQ ID NO: 2077 - DNA, 135 bp, Homo sapiens
aggcgctggttaaaagaggcctaacccctggctttagatttacagtccagagcttcactcatccattttacctgacccccaaggtttttttgggaaaattggggggcggggggcctttttttagcgaaaaccagg

SEQ ID NO: 2078 - DNA, 305 bp, Homo sapiens
taaccaataggccaaagaagaaataacaagagaaattagaaaacacttagagttaaattaaaatggaaagacaacttacccaaacttacaggatatagttaagcagtgctcaacaggaaatttatagctgtaagtgtttacattaaaaaagaaacatctcaaatcaataacctaaatttacatcttaagtaactagaaaaagaaggcaatactaaaccccaaaccagaaagaagtaaataaagattaaagttaagataaataacatagagaatagaaaaattagagagaatcagcaaaacccaag

SEQ ID NO: 2079 - DNA, 339 bp, Homo sapiens
gtctcgctctattgcccaggctggagtgcggtggcactatctcagctcactgcaacctctgcctgctgggttcaagcaattttcgtgcctcattctcccaggtagctgagattacagatgtgggccaccacaccaggctaatttttgtatttttactagagacggggggatacagggctggcccgactcacactgagctgtaagactacaggccgggatccaaggtgaactacaaggaggtggtggaagctcgaaccactcgataaacaccacccttgtcggtagtgggcattgtgctctcttggaaacccttgatggctcccaccttcaaactgcttc

SEQ ID NO: 2080 - DNA, 343 bp, Homo sapiens
aacaacctaacataaaaactacaggaagtagaaaagaaagagcaaaccaaactcaaagctagcaaaagacaataaataaccaaaattggagaagaagtgaatgaaattgaaacacaataaaattacaaaacagatgaatctaatggtggttatttgaaagattagataagattgataaacttctagctatactaatgaaaaaaagagagaagatttaaataaacacaatcagtaatggcaaaggggacattatcactgaccccacaaaaacacagaaaaccctcagagactactacaaacacctctatgcacacaatgtagagaaccttcaagagatggatag

SEQ ID NO: 2081 - DNA, 381 bp, Homo sapiens
aatcccaacactgggcagctgaggtgggtggatcacttgagcccagaaggtcgagagaccagcctaggcaacatggtgaaaccccgtctctactaaaaattcaacaataaaaaaattagctgggcgtggtggcaaggacctgtggtcccagctactcttgggggctgaggcgggaggatcaattgagcctgggaggtcgaggctgtggtgagtggtgaccacaccacttcactccagccggggtgacagagcaggagaactgtcacctcctggggaccctgtttccctcgggtattcaaaaatctcccaaagggaggcaagcatgggctacgcagaagaactctcagtaaggactgctgagtctcttcatatgagctgcag

SEQ ID NO: 2082 - DNA, 411 bp, Homo sapiens
ccaggaacaggtgacgtgtctgatgttggcctagggaagggacggtactacagtgtaaatgtgcccattcaggatggcatacaagatgaaaaatattaccagatctgtgaaagtgtactaaaggaagtataccaagcctttaatcccaaagcagtggtcttacagctgggagctgacacaatagctggggatcccatgtgctcctttaacatgactccagtgggaattggcaagtgtcttaagtacatccttcaatggcagttggcaacactcattttgggaggaggaggctataaccttgccaacacggctcgatgctggacatacttgaccggggtcatcctagggaaaacactatcctctgagatcccagatcatgagtttttcacagcatatggtcctgattatgtg

SEQ ID NO: 2083 - DNA, 401 bp, Homo sapiens
cgttgctgtcggcggtggcattacctttgcagaccaaggctgatgcaaatcgtactgcccctagtggaagtgaataccgacatcctggggcttctgaccgtccacagcctacagcgatgaattcaattgtcatggagactggcaataccaagaactctgcactgatggctaaaaaagcccctacaatgccaaaaccccagtggcacccaccgtggaaactctacagggttatcagtgggcatcttggctgggttcgatgtattgctgtggaacctggaaatcagtggtttgttactggatctgctgacagaactataaagatctgggacttggctagtggcaaattaaaactgtcattgactgggcatattaagactttgcgggggggtgtaattagcccg

SEQ ID NO: 2084 - DNA, 219 bp, Homo sapiens
ggactatgagaatcgaacccatccctgagaatccaaaattctccgtgccacctatcacaccccatccgaaaaaaaaaaaaaaaaaaactttgggggccgttttttacgtaaatccaaactggataaagaccttggaggagttgggccaaccccccccttgaaggcggggaaaaaagggcttatttggagaaattggggaggctatgggcttaatttgga

SEQ ID NO: 2085 - DNA, 344 bp, Homo sapiens
ttatttcactatgatctgcaattctgttttaattaaatgttttatactttttgacatatttggccagctttctcaatgtcagagttctaaatgaagtcttttcaacctagaattatctttgagattttctagttgggctcctggagagcctcaaacaatgtatttttcagcttgtagagctgttaaactaattaggcttgtttgatgtattgagttgtatgagaagcgttggaggcacagatgggatcaaataacaaagtgacactaagtcttctctaaggtatatttatatggctatgttattgatgtgaaagatctaaaaattatgtaaaatttataaatgg

SEQ ID NO: 2086 - DNA, 367 bp, Homo sapiens
  misc_feature (1)...(367): n = A,T,C or G
ggtcttgaactccagaccttgggtgatctgcccgcctctgcctcccaaaatgctgagattacagacgtgagccactgtgcccggccgcctgagacattttgggcaacatctgtgacagaagaaatgtgcatcctttccgggcaggggatttaagaagcggctcatggctgaatatggtatctttgcatctgtctgtggaactgcgggagcatcttctgggataagggactacctgtatgagtcttgtaatgtgttctaaccacgcgcactcccctgtgctcccctatcaccatgactattcacttgaaagcctgatgggcctacgccctcttctgtagcctgtggaggcccaaaatgtttcattgcn

SEQ ID NO: 2087 - DNA, 378 bp, Homo sapiens
gttctccaaccatatggaatcataacagaaatcaaaacacaaagttaactctctaaatacatgaaaattaagcaacatacttctagaaaatccttggatcagagtcacacaaaagaaatatatagcactgaattagaatgaaaataaaaacatacgaacatatgtgggatataactaaaggattgctgagaagaaacctcatagcactagatgcttacatcaaaatagaggaaggaattcaaatcaataaccaaaattctgacctaaagaacctagaaaaagaagagcacattaactcaaagcaagcacaagtaataccggtaataacagaagtcaatgcgaaagaaaaacctgagagaaaatgatacaaagtcaatt

SEQ ID NO: 2088 - DNA, 340 bp, Homo sapiens
tagcactccactcgcagtatgcacagatcatccaaacaaaaaaaaaaaatcagagttaaactaccccctaaacctagtgggtctaactgacatttatagaacatttcacccaactgtggcaaaaaacaaattcctttctttaaaacatgaacattctccagattaaaccttattttaaactacaaaacaagtctcaaagagttcaaagaagtaaaaatcacctcaggtatcacttgggaccacattgaaataaaactagaaatcattacccaagcgaatctcaaaagcttcataaacacatggaaattcaacaacaggcttttgaacatattaaggcaat

SEQ ID NO: 2089 - DNA, 337 bp, Homo sapiens
  misc_feature (1)...(337): n = A,T,C or G
ggtaccactagaaaaatccacccaaattaataagagaaaaagaaacaaagaatacataaagcaagaaaacaaccatacgacagaaacaaacctgtcatataatcgcctcaaatgcaaataggttaaatgctccagaaacagaacggctgaatatattttaaaaacatgatccaactaaatgctgcttacgagaaactagccttgtcagtaaagacacatatgaaccgaaattaaagggatggaaaaaaatattttgtacaaattggaaaccaaaagtgaccagaagctacagttatatcagataaaatagactttaagtcaagaaaggtaaaagacn

SEQ ID NO: 2090 - DNA, 365 bp, Homo sapiens
gtcacaagaaagggaagcttatccattaaggaaattgagccccaaattaggaacgatcgggcaaataaaactccaggcctagatgacttccctggggaattccaccagacactgaaggaagaaaggatcccagtcttacatcaaatctcccagagaagacagaaagcaggaacactgtctaactcatgttatgagtctagcaaaactttaatgctaaattctgatgaagacattacaacaaagaaacatcatgggtcaactcttcccatgaaaatggatgtgaaaatccttaaaaatattagcaagtcaaataaaacaatatcacaaccaagtgggatttatttcaaaatgcaaggttgggtgag

SEQ ID NO: 2091 - DNA, 335 bp, Homo sapiens
gtcagtgcggtcacatacttccagaagagcggaccagggctgctgccagcacctgccactcagagcgcctctgtcgctgggacccttcaggtaggacagctcccaatgctgtggggactctcagcaaaacttctccttcctttccacggctctgcttcttctgacctcatcttagttttgctttttcttttcttccttcgctatttttctatgatcctctaagaaccaagtccttgaaacttttggctcaaagtggatacagagacaactttttctagaaagttcagaaaagtgtattttgaggacggagtctggggaaatcaatgggatggggc

SEQ ID NO: 2092 - DNA, 129 bp, Homo sapiens
taccatctactacggaggctgaagcaggaggatcacttgagctgggaggtcgaggctgcagtgaactgtcatcgtgccactgcatttcagcctgggtgactgagcaaaatcaaaaaagggttgggcgtg

SEQ ID NO: 2093 - DNA, 328 bp, Homo sapiens
acgacagaagggaatacatttaaccaaggcagtaaaagatctctataaggagaacaacaaaacactgctgagagaaatcatagatgacacaaatggaaaaatatttcatacacatagattaaaagaatcaatatcattaaaatggccatactgcccaaagcaatttacagtttcaatgctattcctatcaaactaccaatgtcatttttcacagaactaaaaaagctattctaaaattcacagggaatcaaaaagaagcccaaatagccaaagcaatcataagcaaaaagcacaaagctggagacatcaaattaccagacttaaaact

SEQ ID NO: 2094 - DNA, 344 bp, Homo sapiens
tattctcctgcctcagcctcccgagtagctgggattacaggtgccgactaccacacccagctaattttttgtatttttttggtagagacggtgtttcaccgtgttggccccgctggtttcattctctcgacttcaggcgattcacctgcctcggcctacctaagaggtggcattactggctggatgctccgcgcccggtcagaagcctctatttttaaaaagcccattagcttagacaacgctttacccttccttccatttcccctaagatcctgaggctttgtcgaacctaatgaacatcatgggaccattggatcggcccttaagccttttgggaagacatg

SEQ ID NO: 2095 - DNA, 309 bp, Homo sapiens
agtgctgtagggcctcttctccaaaagtctagattctgataactccattctcttccctttgttcccataaccccagggagagtagctgtttcctaaagtcagtgtcccatctttgctttgtcaattctctaatatttatcaatttccttgtattagatcctctcttttaaaataccaagtgtgaggaggctgggtgcagtggttcatgtctataatcccagtatttgggaggctaaggcgggaggattacttgagcctaggaattcaagaccagtctgggcaacatagtgagatctcgtgtctaaaaat

SEQ ID NO: 2096 - DNA, 333 bp, Homo sapiens
tcaagcaattctcctgcctcagcctccagagtagctgagattacagacatgcgccaccacacccggctaatttttttttttttttttaaggggagacggggcttttccttgtggggcagcctggccttgaactcctgaccacggtggggaagaaagctgaagccgacaagaatgataatgccttagaagaccttcagctgctgatgtttgaagccagccttactatctgtgggaataaccttgatgatcccccaacccactggaaccgcctttattgaaaggtcaaacagaggctctgtattggcgaagaggcaatggcacctgaaggaaccc

SEQ ID NO: 2097 - DNA, 292 bp, Homo sapiens
aagttctaatcagagtaatcagacaagagaaagaaatatagggcatccctacaggaaaggaagaagtcaaaccatctctttgctgatgatattattctatatctaaaaaaccctaaagaccaaaagtctcctaaatttgatgacttcaggaaagtctcaggatacaaaatcaacatacaaaaatcagtagcatttctatacaccaataatatgcaaactgagagccaaatcaagaatgcaatttcatttgcagtagccacacacacaaaaataaaatacctaggaatacatc

SEQ ID NO: 2098 - DNA, 398 bp, Homo sapiens
cgttgctgtcgcatttacagaattttttttgttaaaaaaaactgtagaaatgaaggcttgttattctcatttccattacataaatggttgctcaaatgtgaatttctaatttatcatagtttatggtgatacattaagagactaatgtgtcatttgtgttttgatttctacattctagagagacagtttaatcagtccgtgaccaaaatcaaacagagtaaactgtgtcatcatggagatctgcccaggaaatccccaaaatacagaaggatcagaagtagatggaaataatgtcatagaacgtctctcacaactgtgttataagaatgacagggaagctacaggttacaacagatttgtgaactcagccaagcacagtggtggcagggcctagctgc

SEQ ID NO: 2099 - DNA, 324 bp, Homo sapiens
  misc_feature (1)...(324): n = A,T,C or G
acacagatacacacaacactcctctaaacaccaccaaaatagacattcttctcaagtgcctatggaacaatcttcaggagagagcacatgttaggctacaacacaagtcttcacaaattcaaaagaaattgaaatcatataaagtatttttgacaataactataaaataaaactaaaagtcaatattataaagaaaatgggaaaatccacaaatacgtagaaattaaacaacatactcttcaatgaccaaaaagtcaaggaaaaagacacaaggaaagttgtaaaatacatcgattattctatcttcttggtgaattagccaan

SEQ ID NO: 2100 - DNA, 389 bp, Homo sapiens
cgttgctgtcgattcaagtcctttgcctatttttttctttttttgaggagaatcgcttgaacctgggagaaggttgcagtgagcagagatcatgccactgcactccagcctgggcaacagagcaatattctgtacaaaaaaaaaaccaggacaaattgaaaaaaaaatggaagcggggcatgggggctcacatgttaaatcctacctagttgggaggctgaaatgggaggattgcttgagtcccgggggtcaaggctggagggagctattatggtaccactgtgctccagccagggcaacaaagggagaccctgctgtatcttaaaaaggaaaaagggtggggcgtgagggttcacgcctgtaatcccagcactttgagacgccaaggg

SEQ ID NO: 2101 - DNA, 336 bp, Homo sapiens
  misc_feature (1)...(336): n = A,T,C or G
atatgatatatcaacttaagttattttaaataacttacaagacacattgaaaacaagtaacaaatgttaatcctttgtgatcattattttaaatgtaaatagattagactccctagtcaaaagactagagtggctgaattctgaatggattaaaagaaagaaaaagaaagattcgattttaaactttgtaaaggaaactcactttagatttaagatcacttacaggctgaaagtgaatggatggaaaaacacattctgtgcaagttgtaaccaaaagagagcagagatgactntacttatatgagacaaaataaactttgaaaaacactgtcaaat

SEQ ID NO: 2102 - DNA, 327 bp, Homo sapiens
tctagcagtagacagtatataacttagagtcaagaaatgttgggccaggcgcggtggctcacgcctgtagacgaaaggctcccggagtgatgatcgtctagagacttgatagaacatggaagggggacgttgcccacatatatgcaaatctattgcactggagatattgcagacataaaggaaatgggtactgttcataaaagaatgccccacaagtgttaaaaatgtgcctgataaaatataagtgactactggcctggagcagtggctcacgcctgtaatcctagcactttgagaggccaaggcaggtggatcacctgaggtccg

SEQ ID NO: 2103 - DNA, 331 bp, Homo sapiens
ggggcagtatatctttgttaattgcccctcaatctctctcctggaatggcatccttttactttgacctctgctccagaggaagatttcttctccattcatatccgagcagcaggggactggacagaaaatctcataagggctttcgaacaacaatattcaccaattcccaggattgaagtggatggtccctttggcacagccagtgaggatgttttccagtatgaagtggctgtgctggttggagcaggaattggggtcaccccctttgcttctatcttgaaatccatctggtacaaattccagtgtgcagaccacaacctcaaaacaaaa

SEQ ID NO: 2104 - DNA, 319 bp, Homo sapiens
aggctgaagtgcagtgatgcgatcatgactcactgcaccctcaacctcctgggctcaagtgatcctcccaactcagcctgccaaggggctggtaccacaggaatgcaatcataaacttctgggctcaaatgatgactcttgatttggtactcccaaagagcaggaactacacgcatgagccactgagcctggctggaactaaacagatcacactgtgctaaaagaaaatatttcccacgtattacttctaacagctgttacacaaatgcgtctaggttcataaactatatcacttgtaaaattccctttataacgctca

SEQ ID NO: 2105 - DNA, 332 bp, Homo sapiens
ggagttcaaggttacagtgagctatgatcatgccactgcactccagcctgggcaacagagcaagacttgtctctaaaaaataaaaataaaggtgagatgcacaggacctgtgtgtagaatgttatatgagtaaggaaatatagtctaaagtggaaaataaaaaggttatagcaggcatttaaagggagacaggaagagcaagtggatagaaaagtatttgaagagttagggaacaagggagtaacacctgacttgcttctcagtctacccgaagaatctgtaaatcaccaggcatggtggctcatgcctgtaattccaacactttacgaggc

SEQ ID NO: 2106 - DNA, 193 bp, Homo sapiens
agacaaaaaaggaaggaatcgaaccccccatagctggtttcaagccaaccccatggcctccatgactttttcaaaaaaatagaaatgaatactataatgagggggcgcttttctcttgaatccccaaatttagaaaacctttggggggtgggggcccccccccctttttatgggggggaaaacattttttttt

SEQ ID NO: 2107 - DNA, 378 bp, Homo sapiens
ttccaaccttcctttttttaaattttctccagtccctgggagcaagttgcagtcttttttttttttttcccttttgggcccaaccccccttgttttaagggccttttttttaaccccaggggcccaaattaaatgggggggaaaacccttggcccaaaaaccaggggaaaaaaatccttacccctttttggtcaaaagtaatttttaacccttcccccttgaacaaaaaccggtgggaaacaaccccccccgaccttggggaaaaaaaaaaaaacctgccccctttctttttgtggaaactggagggggcgaagcccccgggaaaaagccaaaaaaacccaacctttttccccccttcctgggaaaatgggcccaaaa

SEQ ID NO: 2108 - DNA, 343 bp, Homo sapiens
tctgcaggctgcagtgcaatggcatgatcatagctcactgcagccttgaacccctgggctcaagtgatcctcccactttagtgtcccaagtattaaatagctggcattacagacatgtgccaccatgcctggctgtttctcgttttttttagagatgggatctcactatgttgccaaggctggtctcgaacttctggcctcaaatgatcttcttgccttggcccctcaaagagctggattacaggagtgagctactgtgtccagcctaatcttcgttcttggagtcaagttgtgtaggctttgttttttgctttgcttttttttttttcccccaccctaagtg

SEQ ID NO: 2109 - DNA, 147 bp, Homo sapiens
cggtacggttgcgagaaaacaacagaaggggctctttccgccatctttccgcgccgccacaatggtgcgcatgaatgtcctgtcagatgctctcttgagtatccacagtgccgaaaagagaggcaaacgccatgtgcttattatgcc

SEQ ID NO: 2110 - DNA, 382 bp, Homo sapiens
ggcacgagctggaatcctgctatggagttagatcatgtcctaaccttcagctcaggcagctctaggcctgcttcccgcccacctggatgtcctgcttttggccaagtcagcttgtctcaggtctggtctctcctcccatccatgtcgggtccccccaaccccctacaacaatagtgcttgaactagagactctttctcggccagcttcttggcaaaggttttaaataacacatgcctctggctgggttctgtgctctgccagtcgagtggccctcgtcagcctcatccactttattcttacccatcttttcaggcttcaccctgaagaactgggaggccctccactgaagaagctgaaacaagaggttggagaacagagtca

SEQ ID NO: 2111 - DNA, 460 bp, Homo sapiens
  misc_feature (1)...(460): n = A,T,C or G
ctactaaacaagctacgcaggactttctgcaagatcccatcgattcgtagttccgtagctagtagcaactacccactcacctatccacccatccacctacctatttgtcacccatccacccatccatccatccaatcacccatccaaccatcaatccaaccattttcatctgttcattttccatccatctacccgtccacccattcactcctccatccacctacctatccatttatcacccatttacccatccatccatccatccttccaaccatttatccacccatccaaacatttccatctgtttttccatccatctacccatccacccattcactcatccatccaccttcctatccatttatcatccatctacccactcacccatccatccaaccttccaaccatttatccacccatccaactatttccatctgttcattttccacccatttacccn

SEQ ID NO: 2112 - DNA, 385 bp, Homo sapiens
cgttgctgtcgttcaatttcttgaatgttttaagacttgttttgtgaacctaacatatggaatatcctacagaatgatccatatgctgaggagaagaatgtgtattctgcagccattagatgaaatgttcggtaaatatctattaggtccgtttggtctttagtgcagattaaatccagtgtttctttggtgattttctgtctggaagatctgtctgttcaatgctgaaagtagggtgttgaagtctccagccattatcgtcttgagatctcgctctctctttagttctaatatttgctttatgtatctcagtgctccagtgatgggtacatatatactcacaatcattgtatcctcttgctgcattgactgcattatcattata

SEQ ID NO: 2113 - DNA, 333 bp, Homo sapiens
ggatttatccctgggatgcaaggatgggtcaacatatgcaaattaattaatgtgatatatctcattaacagaatgaaagataaaaattacatctcaatagaagcagaaaaaaatttgacaaaattcaacactcttttacaataagaattatcaacaaagtatggaaggaatatacttcaacatgttaagagctataatacgaaaagcccagagacaacatcacaactagtggtgaaaacctgaaagtgtttcctctaagatcaggaaaaaggcaaggaggccaactcttgctacatctatttaacatagtactggaaattctagccagagcaa

SEQ ID NO: 2114 - DNA, 311 bp, Homo sapiens
atactgctttgtgatctgtggattcctcttacagggttaaaccattttttttgattcagcaggttggaagtactctttttgaagaatctgcgaggaaaggttgggagcccattgagacctatggggaataacagaatatctccagataaaaacaagaaagaaattatctgtgcaactgctttgtgatgtgtggattcacctcacagagttaaacctttcttttgattcagcatgttggaaaccctgtttttgcatgttctgcgaagagacagttaagagcccattgaggcctatggggaaaaccaaatatc

SEQ ID NO: 2115 - DNA, 313 bp, Homo sapiens
taaaggccagatgttatcagcagctgaacagcatctacagaaaccagctgcaaagacagaagcagaaaaactggtttggtggagagacccgataacaaaaagttgggaaataggtaaaataataacctggggtagaggttatgcttgtgtttctccaggccaaaatcaacagccgatttggataccatcaagacacctgaaaccttattatgagccagatgctgaggaagagattctgggaggatcccaaggactccccagttgcagccatgtcgagactgatgctgaagaggaccccaactgtcacaagcaa

SEQ ID NO: 2116 - DNA, 355 bp, Homo sapiens
attaaaggaactcttaggtgaaaaatcagataatgaaatttacatctcaaagtacagagagaatctgatggtgcttgagggagattaaaaatgaatgccgaatcaaacataaaattatagaaatctatcatagaattatgtaataagaccaattttattttgctagagaccacctatctcctaactgggtatctgagctttgggcagagcccatgttcaatcctggttctccaaaaaaggagaattcttatgtggctaggccaggtgattgttctacagtacatcaaggaaatctttttaacaaagacatttctatgtgtctaagctatactattcctttaagatccaagagtag

SEQ ID NO: 2117 - DNA, 405 bp, Homo sapiens
cgttgctgtcgctttttcccagaaaacaaggggttagatgttgcatttcataaaactaaccgaagttctgtctactgatgcagcacaagagatgtataaaaaaaaaaaaaaaaaaccccccccccgggggaaagacccttttaaggtttggtttggtttttttttttgggttgggtttttggtttttttacctcagggaaaaacctggaaaaggggcaaaacctcttatttggattttttattagggggccttttttaaaaaaaaggctccactgggaaaggaaaaaggggggggggggggggaaaaaaaaaaactttgggggtagggggatataaaaaaattttggccctttggttcaaaaaacccgcattttaaaaaaaaaaaaattcccaccccaaccaccc

SEQ ID NO: 2118 - DNA, 386 bp, Homo sapiens
ggcacgaggtttactggtgcagagaaccattgcaggacttctcctaaagaaaatttgtaggggtgtctttgtccaagacaccccccagaatctaaaaatgctgcgtatagtggaaccttatgtgacctggggatttccaaatctgaagtctgtgcgagaactcattttgaaacgtggacaagccaaggtcaagaataagaccatccctctgacagacaataccgtgattgacgagcacctggggaagtttgtcgtcatttgcttggaagacctcattcatgaaattgccttcccagggaagcatttccaggagatctcatgggtcttgcgccctttccacctctcagtggcccgtcatgctaccaaaaatagagtgggctctctca

SEQ ID NO: 2119 - DNA, 350 bp, Homo sapiens
atagttgttcacactgagcctctagcagttcatcaattacagttcaggtttcttatggaagtttgctgtgtgagtgtttctgctctgattactcgtgattctccgtattcaccttctgtctctccagtttgggggcagctgtttgacctgtgacttaacttctcttacagatctaagaaaagttgttgatttttcagtttgttcagctttttacttgctcttaggatcgagttgactgatctcttctcgcctgcttctttttgtgttcccttttttttttatactcaacttctttcctcctttatttgctcgcgtcctggttctcatcgattctctcttctccccttcct

SEQ ID NO: 2120 - DNA, 323 bp, Homo sapiens
attgagagctataacaagaaggcaaagtatcttcttgtgtgacctcagctgggaacatgcacattgagagactcaaaccttttgctgccccacacacatccatgaataactacaacagtgctgcaagtattgatttgggggttttgaataaattttaatgagcagataaatttgcaaatacagaatctgcaaataatgagggtcactggtatttggtgctttttcgagaatgggtggaagacggcactcagctgggactgtccaatggggagaggtccatgtgtggccctccaacatgtcacagggcacttggacttcttatt

SEQ ID NO: 2121 - DNA, 317 bp, Homo sapiens
aggtagataaacggatggacagatgctgggtgaatggatgggtggatagatggataaattgatatatggatggatgagtagatacatgggtagatgggtggacgaatatatgagtggactagtaaatgggtgagtgaatgcatggatggatggatggatattttgacgagttaatatatattttggatgtttaaggatatttattttttgtatattggattttattttatttatttttgtttttttgtatattatttatattttttgttttttttataaatatgttgtttttgatatttgcggtgtgtttatttttg

SEQ ID NO: 2122 - DNA, 387 bp, Homo sapiens
attctgtacacacagcctatggggtagccctgctccacagttgcggttgtacactgctgcttcaataaaagttgctgtttaacactaccagctcacccttgaattctttcctgggtgaagctaagaaccctcccacgctaatccgcgattttggggcttgcctgtcctttcaataggacattgctaaattgctctctagaattgcttttccaggttgggcgcagtggctcacatctgaaatcccagcactttgggaggctgaggcaggcagatcacctgaggtcaggtgttcaagaccagcctggcctacatggcaaatccctgtctttactaaaaatacaaaaattagctgcgcatggtggcctatgcctgtaatcccagctactt

SEQ ID NO: 2123 - DNA, 328 bp, Homo sapiens
attctgtacacacagcctatggggtagccctgctccacagttgcggttgtacactgctgcttcaataaaagttgctgtttaacactaccagctcacccttgaattctttcctgggtgaagctaagaaccctcccacgctaatccgcgattttggggcttgcctgtcctttcaataggacattgctaaattgctctctagaattgcttttccaggttgggcgcagtggctcacatctgaaatcccagcactttgggaggctgaagcaggcagatcacctgaggtcaggtgttcaagaccagcctggcctacatggcaaatccctgtctt

SEQ ID NO: 2124 - DNA, 343 bp, Homo sapiens
gactttcagagacaaacaaaagctgaggaaatttatcaacaccagacatgtcttacaagaaatgataaagggagttctttaatctaaaataaatggacactagatgcaacaagaaaccgtctgaaggtattgaactcccaggtaaaagaaagaaaatagacaaacttaaaatactcctaatactgtaatcgggataagtaaatcatatatcctatgtatgaagactaaaagacaaaaatgttaaaaataactgcaggccaggtgcggtggctcacgcccagtaatcccagcactttgggaggttgaggcgggcagatcacgagatcaagagattgagaccagc

SEQ ID NO: 2125 - DNA, 318 bp, Homo sapiens
gagtgcggtcacatacttccagaagagcggaccagggctgctgccagcactccactcagagcgcctctgtcgctgggacccttcaggtaggacagctcccaacgctgtggggactctcagcaaaacttctccttcctttccacggctctgcttcttctgacctcatcttagctttgctttttcttttcttccttcgctatttttctatgatcctctaagaaccaagtccttgaaacttttggctcaaagtggatacagagacaactttttctagaaagttcagaaaagtgtattttgaggacggagtctggggaaatc

SEQ ID NO: 2126 - DNA, 302 bp, Homo sapiens
ccatccatccatcctttcagccagccagccagcctgccttctgtctaaccattaatccactcagccacctatccacccatccatccatgcattcagtctatccatccctgcatccaatccatcctttcatgtatctgtccgctcatccatccacccattcatctgtccattcaaccacccacaaatctacccatccatgtgtgggagagcatgatttaactcatatataaacaatttataattactgtgataagagctgcaaagggaataaacatggtattaaaggataatagtcactagtg

SEQ ID NO: 2127 - DNA, 347 bp, Homo sapiens
catatgcagaagacacctaccttgtaccatatataaaaattaatacaaagattaaaaatttaaatgtaagaccacagactttatgcaccctagaagaaaacctaagaaacaccattctggacgtcagctttcggaaagaacatatgactaagtcttcaacagcaattgcgacaaaaacaaaaattgacaagtgggacctaaactaaagagtttctgcacagcacgagaaactatcaacaaagtatacagacgacctacagaataggagaaaatattcacaaactatgcatctgacaaaggtctaatacccagaatctataacgaacttaggcaattctataagcaag

SEQ ID NO: 2128 - DNA, 374 bp, Homo sapiens
ttccttggcttataaaacgtttttcagtttgatgcaaaatgatgcgcttattttggtttttgttggctgtgcatttggagtcagagccaacaaatcattgtcttgaagcttttcaactatgttttcttctagcagttttatagtttcaggtcttaggtttaagtctttaattcattttgagttggatttgtgtgtggtgtgatgtaagggatgcatgtggatattcattttcctgacaacatttattgacgagattgtcttttccccatcatgggttcttggcacctttgtcaaaaatcagttgaccttaaaaatgtggatttatttctgggctctctattcttttccattgaatgatctgtttgtttttatac

SEQ ID NO: 2129 - DNA, 387 bp, Homo sapiens
  misc_feature (1)...(387): n = A,T,C or G
agcactctgggaggccggggcgggctgtttgcttatgttcgggatttcnagaccagcctaggtaacatggcaaaaccccgtctctacaaaaaatacaaaaattagcctggcctatattcccagttacttgcggggctgaagcaggaaagattgcttgagcctacgaggtcgagactgcagtgagctgagattgtgccactggcactgtggcctggatgataaagtgagaccctgtcttataaaatcaagagaaaagagaagaatcagtattgtgattaataagggagaattccacgctgggcatggaggctcatgcctgtaatcccaacactttgggaggccgagggggcatggatcttctgtgggcaaggattttcagaaccagcg

SEQ ID NO: 2130 - DNA, 149 bp, Homo sapiens
gctctcgctcggtctttctgccgccatcttggttccgcgttccctgcacagcctcctttttattcccttccttcagaaatgcccggcgaagccacagaaaccgtccctgctacagagcaggagttgccgcagccccaggctgagacagg

SEQ ID NO: 2131 - DNA, 402 bp, Homo sapiens
  misc_feature (1)...(402): n = A,T,C or G
attccacattccagccagtgggaaaaggaaagggggaatggcataccctttccctttaaggtacaccctaggctgggcacagtggtgtgagccagaagtcccagctactcgggaggctgaggcgggagaatcacttgagtccaagagttctgggttgtagtgcgctgtgtcaatcgggtgcctacactaagctcagtatcaacatggtgatctccctgggagaggggaaccaccaggttgcctaaggagggctgaaatggcccagatcggaaaggtcaaaactcccgtgctgatccagtagtggaatcactcccgtanatagccaaaacactccagcctgggcaacaaagtgagaccctgtctctaanaaaaaaaaaaaaaaaaaacaccctggctgggcag

SEQ ID NO: 2132 - DNA, 336 bp, Homo sapiens
gctctgccagccactggagaatggacgtaatggagccaaggatggcaccaggaagtcacgggggcagtgtttgctgctgtccaggcaatcacagtattggtgtcgtgtctcagcaggctgggggttggggccctggattcaaagcatccatctgaacatattgtcacccgtgcatcctgagagagacagcttcatggagtggaggtgtgtggcctggaggccccacgtaggccaccaggcatgttttccacgaaaaccgaaacttctgacgggattactaacattgggagatttccgtttcttggacgccagtggaggggctgcaccagccttaaa

SEQ ID NO: 2133 - DNA, 362 bp, Homo sapiens
  misc_feature (1)...(362): n = A,T,C or G
gatgacttcccttacctactttgtccagaggctgttcacctgggagacctgctggtatatgggccacggagatttgcacccccttccccggattctcaagtgccactagaagtctccagaactgtgaatttattctagcacgccctgcacttcacaagaaaaagagatctctccctgggctcctgccggctcctccaggatacagcactggagaaggcaacttggtgtttcctatctccgccactctggatttgggaatccaaacccaactccctttctatcactgacagcgattgaggccaatgcctactcctttgggatgatgctcgcctgtctcaagaccgactgacccatgttcaacn

SEQ ID NO: 2134 - DNA, 278 bp, Homo sapiens
tgcggatgcgatcatgccacggcactctagcctgcatgatagagcgagatcctgtttatgaagaaaaagagactgggcacggtggctcacgcctgtaatcccagcactctgggacgccgacgtgggcggatcacgaggtcacgagatcgagaccatcctgggcaacgtggagaaaccctgtctctactgaaaatataccaaataactggggatggacgggcacacctgttgcctcagtttcttgggaggttaaggcctgggaaccacttgggcccggt

SEQ ID NO: 2135 - DNA, 316 bp, Homo sapiens
actggaatggaatattttcagatatgaccagattgctttgaggaattgaagttgactttatagagctaataaaaaacccagtttctttgcaagtttcctgacctgtgtaccttgactgaaaaggtacctttacaaggtacacagtttcttcacaaggttcctgacctgtggtaagtgacgagtgttactttctgacgtgcccaggaacctcaagttattttgggacctcaagaagagaagaatttacccaattcatacaggcattgcagacagtcaatgattaatgacaaatccttgccttggttttatagcctcc

SEQ ID NO: 2136 - DNA, 340 bp, Homo sapiens
ccagctacttgggaggctgaggccggagaatcacttgaacccggggggcagaggttccagtgagccgagatcctgccactgcactccagcctgggcgacagcatgagactccgtctcaaaaaaaaaaaaaaaaaaaaatggcccgggaaggggggctaatccctgaaatccggcccctttggggggccgggggggggggatcacctggggtaaggatttcaagacccccctgaccaacagggggaaatcccatctttcccaaaaaaccaaaatttatttgaccgtgggggcgggccctttgatccccaatttttttggagggcttgaaacgggaaaattg

SEQ ID NO: 2137 - DNA, 136 bp, Homo sapiens
gagccacctcgcgcgcgcctccaggagcaagtatggagaggctggtgatcaagatgcccttctctcatctgtctacctacagcctggtttgggtcatggcagcagtggggctgtgcacaacacaagtgcaagtggg

SEQ ID NO: 2138 - DNA, 408 bp, Homo sapiens
ggcacgagccacggacgtccaaaaagtccaaaccaaaggacagcgataaagaaggaacttcaaattccacctctgaagatgggccaggggatggattcaccattctgtcttctaagagccttgttctgggacagaagctgtccttaacccagagtgacatcagccatattggctccatgagagtggagggcattgtccacccaaccacagccgaaattgacctcaaagaagatatagccgccgtcagccaatccagtggactcgcagccaaatttgtcatccactgtcacatccctcagtggggctccgacaaatgtgaagaacagcttgaagagaccatcaaaaactgcctgtcagcggcggaggacaagaagctaaagtccgtcgcgttcccgcctttccccagcg

SEQ ID NO: 2139 - DNA, 322 bp, Homo sapiens
attccacattccagccagtgggaaaaggaaagggggaatggcataccctttccctttaaggtacaccctaggctgggcacagtggtgtgagccagaagtcccagctactcgggaggctgaggcgggagaatcacttgagtccaagagttctgggttgtagtgcgctgtgtcaatcgggtgcctacactaagctcagtatcaacatggtgatctccctgggagaggggaaccaccaggttgcctaaggagggctgaaatggcccagatcggaaaggtcaaaactcccgtgctgatccagtagtggaatcactcccgtaaatag

SEQ ID NO: 2140 - DNA, 334 bp, Homo sapiens
gactcactctgccagccactggagaatggacgtaatggagccaaggatggcaccaggaagtcacgggggcagagtttgctgctgtccaggcaatcacagtattggtgtcgtgtctcagcaagctgggggttggggccctggattcaaagcatccatctgaacatattgtcacccgtgcatcctgagagagacagcttcatggagtggaggtgtgtggcctggaggccccacgtaagccaccaggcatgttttccacgaaaaccgaaacttgtgacgggattactaacattgggagatttccgtttcttggacgccagtggaggggctgcaccaa

SEQ ID NO: 2141 - DNA, 132 bp, Homo sapiens
gagccgcctggataccgcagctaggaataatggaataggaccgcggttctatttcgttggtttttcgagctggggccatgactcacatggggtgtcgggcgtatttggattgtttcgagtggaggggtgggg

SEQ ID NO: 2142 - DNA, 321 bp, Homo sapiens
taaacttaagtaaaggagtggaaaagggcatttcatgcaaatggacaccaaaaacgagctggggtagcaattcttacataagacaaaacaaactttaaagcaacaacagttaaaagagacagagatgttatataatggtaaaagtccttgttcaacaggaaaatatcacaatcctaaacatacatgcacctaacactggagctcccaagtttataaaactatgactaatagacctaagaaatgagatagacaacaacacaataatagtgtgggacttcaatactccactgacagcactaggcaggtcatcaagacagaaag

SEQ ID NO: 2143 - DNA, 312 bp, Homo sapiens
  misc_feature (1)...(312): n = A,T,C or G
ggagcactgggccaaaaacaaaatcaagagggaaattaaaaacattctttgaattgaatgacaataacagcacaacctatcaaaacctctgggagcagctaacgtggtgcaaagaggaaagttcgtagccctaaatgcctacatcaaaaagtctgaaagagcacaaacagacaatctaaggtcacacctcaaggaactccagaagcaagaacaaaccaaacccaaacccagcagaaggaaggaaataaccaagatcagagcagcactaaatgaaattgaaacaaacaaaacaacaaaatacaaaagacaaan

SEQ ID NO: 2144 - DNA, 157 bp, Homo sapiens
tccttttgggaggtgacgacctacgggcactttaacgtgcctatcacctaggatctccataatatgtctctagaagaggagatgaggaatccctctacaaaacacgtgatgcggagccccaattcctacttcctggatgtgaaacgcccatgatgct

SEQ ID NO: 2145 - DNA, 336 bp, Homo sapiens
tgctttgagtagtaagggcattttaacaatgcttatttttccagtccatgaatatggaatatctttccatttatttggatcttcttcaatttcatgcaccagtgtttgatagtttttgttacagagatctttcacttctttggttgattcctagggattttataatatttattgatttgcaaataatatttattgatttgcaaatgttgaaccatgcttgcattctagggataaatcccacttgatcatgatgaatgatctttttaatgtgttgctgaatttgatttgctggtattttgttgagaatttttgcatcaatacttaattgcatttcag

SEQ ID NO: 2146 - DNA, 413 bp, Homo sapiens
  misc_feature (1)...(413): n = A,T,C or G
gactcactctgccagccactggagaatggacgtaatggagccaaggatggcaccaggaagtcacgggggcagtgtttgctgctgtccaggcaatcacagtattggtgtcgtgtctcaacaggctgggggttggggccctggattcaaagcatccatctgaacatattgtcacccgtgcatcctgagagagacagcttcatggagtggaggtgtgtggcctggaggccccacgtaggccaccaggcatgttttccacgaaaaccgaaacttctgacgggattactaacattgggagatttccgtttcttggacgccagtggaggggctgcaccagccttaaaaagaaatcatgtgagcctccacgaatcagcagacacaggagaaantaagggtctgcccactttagtgggttg

SEQ ID NO: 2147 - DNA, 338 bp, Homo sapiens
gtaacaaactgtggtcaaggcagaaacaaacagtgagatcaaatcagtaatttaaaaattgccaaaaaccaaaagcccaggtctaggcagattcacagctgaattataccagaccttcaaaaattaatggtattaatcctattaaattatcccaaaagattgaaaaaaagggaatcttccctaacatagctgtgaaatcagtatcactttgacaccaaagtcaggaaaggacatagaaaagtggaaagtagagaccaatatccctgatgagtatacacgcaaaaatcctcaacaagataccagcaaatataatccaacagcacattaaaattgtaatt

SEQ ID NO: 2148 - DNA, 333 bp, Homo sapiens
ataagcaaaaggcccagtccctgtcctcaggagctcatggtccaagtcaaaatcacataaaaacatttgagtcccctttgaaatgagtattgttttcttgaacaaattttcaacttgctgtagtttttttcctgatcactttcatcctgtctttccaagatgggatatgtttatttagaaattacttcacctgggacagctgcttctctcttttgctcaggcccgtagcactgcaggatgggcaagtgtcgtggacctcatactgctaggagtctctgtagtcaccaacaagatcagaagtggcatgataaacagtacaagaaagcccatttg

SEQ ID NO: 2149 - DNA, 344 bp, Homo sapiens
cagtgttcaagatacaaaatcaatgcacaaaaatcagtagcatttctatacaccaacagcatccagggtgcacgtggaataaaaaacacaatcctactcaaaatagccacaaagaaaatgaaattatctaggaatacagctaaccaaagaggtgaaagacctgtacaaagagaaccaccaaacactgctgaaagaattcagaaatgacacacatgaacagaaaacattccatgctcatggattgaaagaatcaatgtcatttgaaatgtccatactgcacgaagtaatttaaagattcaatgctattcctatcaaactaccaatgtcattcttcataggattag

SEQ ID NO: 2150 - DNA, 400 bp, Homo sapiens
gggaaatgcgtgttctagctttctgtgtgcttaggtgcccgagctactgagggtctaagtccgggcagccgaagagtgtggtcgcaagatgaacaaagatgcgcagatgagagcagcgattaaccaaaagttgatagaaactggagaaagagaacgcctcacagagttgctgagagctaaattaattgaatgtggctggaaggatcagttgaaggcacactgtaaagaggtaattaaagaaaaaggactagaacacgttactgttgatgacttggtggctgaaatcactccaaaaggcagagccctggtacctgacagtgtaaagaaggagctcctacaaagaataagaacattccttgctcagcatgccagcctttaagattgaattagattgtggtgg

SEQ ID NO: 2151 - DNA, 354 bp, Homo sapiens
ggaaatgcgtgttctagctttctgtgtgcttaggtgcccgagctactgagggtctaagtccgggcagccgaagagtgtggttagcaagatgaacaaagatgcgcagatgagagcagcgattaaccaaaagttgatagaaactggagaaagagaacgcctcaaagagttgctgagagctaaattaattgaatgtggctggaaggatcagttgaaggcacactgtaaagaggtaattaaagaaaaaggactagaacacgttactgttgatgacttggtggctgaaatcactccaaaaggcagagccctggtacctgacagtgtaaagaaggagctcctaacaagaataagaacatt

SEQ ID NO: 2152 - DNA, 278 bp, Homo sapiens
cgccggtgtgatacactgacctgactattaacagcccaatatctacaatcaaccagcaagtccttattaccctcactgtcaacccaacacaggcatgctcgtgggaaaccaccctttatttgagattaaaaaagggggcttttttttaaaaagccccaccacttggcatatcctgggaggggttggcccccccccccccttggtggccggggaaaagggccttttttttgaatttttggaacccccggggttttttgggccccttataacccggcatt

SEQ ID NO: 2153 - DNA, 336 bp, Homo sapiens
gggaaatgcgtgttctagctttctgtgtgcttaggtgcccgagctactgagggtctaagtccgggcagccgaagagtgtggtcgcacgatgaacaaagatgcgcagatgagagcagcgattaaccaaaagttgatagatactggagaaggagaacgcctcaaagagttgctgagagctaaattaattgaatgtggctggaaggatcagttgaaggcacactgtaaagaggttattaaagaaaaaggactagaacacgttacttgtgatgacttggtggctgaaatcactcccaaaggcagagcccttgtacctgacagtgtgaaaaaaggagctcc

SEQ ID NO: 2154 - DNA, 334 bp, Homo sapiens
agaacttgagaaactataaatacatagaaactaagcaacatgctcttgaatgatcattaggttaaggacaaaattaaggagaaaatcaaaaaaattcttgcaacaaatgaaaattgaaacacaacataccaaaaacctacgggatgtggaaaagaaggaaaatttccagcaataaatgcctacatggaaaaaatagtaagatttcaaataaacaatctaacaatgcaactctataagctagatacacaaaaacaaaccagactcaaaattagtaaaataaataataagatcagagcaaagctaaataaatacgagagatcaatcaaacaaacat

SEQ ID NO: 2155 - DNA, 331 bp, Homo sapiens
ttctgtctcagcctcccgagtatctgggactactggtgcccaccaccacacctggctagttttttgtatttttagtagagacggggtttcaccatgttggtcaggatggtctcgatctcttgacctcgtaatgtacccgactcgggctcccaaagtgcctggatgacctctacgtatctgttagatttacttctccacgttcttatcaacctgtttgcgtatgctcatgagctgtttcttgttccgggagtgaagccaggccttttcctttctcttatgcagagtaactgccactgcctgggactttcagtcaacctcgtgcgccaggcac

SEQ ID NO: 2156 - DNA, 334 bp, Homo sapiens
aaattaacaatctaacatcacacctagaggaactagaaaaacaaaaacatactaaccccaaactggcagaagaaaaaaaaataactaaaatcagagcagtactgtacagaattgagacccaaaaaaatcatacaaaaattcaacaaaaccaaaaggtggttcttccaaaggataaacaagattgatagaccacaggctaaattaacaaagaaaagagaaaagatccaaacaagcacaatcagaaacaacaaaagtgaaattaccatcaatcccacaaaaatacaaaaaatcctcaaaaactattatgaaaacccctatgcacaccaactaaaaa

SEQ ID NO: 2157 - DNA, 337 bp, Homo sapiens
agtgagccatgattgtgccaccacactccagcacaggcaaaaaagcagaccctatttctaaaaaaaaaaaaaattaaaattaaaaacatttttaaagaatgacatttcacaatgataaaatgacaaacccatcatgatgatataataattacaaacatatatgcccctaacaacagagcctcaaaatacatgaagcaaaagctgacagaattgaagagtaaaatcatcaatacaaaaataatatttggagccttcaatatcccactttcaattatgaacagaacaactacacagaaggtcaatgaggaaataaaagattgaataacacttcaaacca

SEQ ID NO: 2158 - DNA, 343 bp, Homo sapiens
  misc_feature (1)...(343): n = A,T,C or G
tacggttgttagnnnnnnnnnnngggtactgtttttctgagcacaggatataggaatcaatctgttcttattttatatttcaggtaatatctcccagctgtaatgatgacatcacagtgaaaaaggatcagtgtttagttcgatcatttattgattctaaattgtgagtaatgaatcctttaatgatgttacgtgggaggaaaaaaaaaatagaattacaatgatagacacctcccccaccaaaactttatttttaaaagtctaatcattcatgaactgagaagttgttacctaataggttttgactttttgtaatgtagggtatttttcactaataaatttg

SEQ ID NO: 2159 - DNA, 354 bp, Homo sapiens
agggggtgcggcgcgggtcctccatatgctgagcgccggtcccctgggcccacttttctttctctatactttggctctgttgcctttcttttctcaagtctctcgttccacctgaggagaaatgcccacagctgtggaggcgcaggccactccatctggtgcccaacgtggatgctttcctctagggtgaagggactctcgagtgtggtcattgaggacaagtcaacgagagattcccgagtacgtctacagtgagccttgtgggtgaaggtactctacagtgtggtcattgaggacaagttgacgagagagtcccaagtacgtccacggtcagccttgcggtaagcttgtgtg

SEQ ID NO: 2160 - DNA, 317 bp, Homo sapiens
gatataaattaatatacaaaaatcaattgtatttctatacacttgcaatgaatcatccaaaactaaaattaagtaaacaatttcatttacagtaacatcataaagagtaaaacatttacgaataaatttaacaaaaacattttcaacatatactctgaaaactacaaaacattgtttaaagagagtcaaaaatatctacagaataggaaaaagaatgcacattcacgaataagaaggcttgatattgtttaagatgacaatattccccaaactgatctacagattcaaagcagtctgtagcagaatcccagctgacc

SEQ ID NO: 2161 - DNA, 318 bp, Homo sapiens
gcatggatgattttcaaggatagaccatggctaggccacaaaataagtctttaaaaactaaagaaaaaatataattatgtcaaatatcttttccgattacacaggaaaaagctagaaataacaggaattttggaaaatatgaaaaataaacagtatgaatgtcctgaatgactagtgagaaaacacagaaattaagaaaaaataaaaataaattgaaacaaatgagaatgaaaacacaacataccaaaacctatgagatacaacaaaagcagtactaagaggaaggtttatggcaataagtgcctacatcaaaaaagg

SEQ ID NO: 2162 - DNA, 234 bp, Homo sapiens
  misc_feature (1)...(234): n = A,T,C or G
cccaggagggttggccggacacagtggtagtggctcacacctgtaatcctaatgctttgggagcctgaggcgggaggaccccttgagcccaagaggtcaaggccacaatgagctatgatggtgccactgtactccggcctgggcagcagagcaaaaccctgtctcanaagagagagagaaagccgggtgtggtggttcacacctgtaatcccagcattttgggagcccaaggcn

SEQ ID NO: 2163 - DNA, 345 bp, Homo sapiens
agataaataattgtgtctttccttgtgttcattctgagctttatatatacttaatgcataacacctatcacattggactacaactaactgtttcttcccttctaggtaatgatctccaaaatataaacatgatttatcacttggcacatgatatttcataaatgcttgttgaacaaacaaataaaatactatcaaaggtgggaaggaaggaacaaaagggaaatagtatgagatagtttttacctgcacgagttcattgaggacaacagcatcaaagccagaaaggtactgcacgtaatacctctgcattacaggtccgtatttcctcacatgtgctctaaggtc

SEQ ID NO: 2164 - DNA, 402 bp, Homo sapiens
cgttgctgtcgatttcgattttctggaaatataatttgtcactttaaaaattatgtaaattgctattggtattaagtgtaagaaaactttgcttcatctatgatcacaaatattttcttctgaaaaaaaagctctctgaagagttttttttttcaatgaaggggttttctttcttctctccatatgttatcttctgaatagctaagcaatgtttacattatttattcaggcctttccatccactttcacggattccactgaaggagaaattgggtttgaaatcctcttttctcaaaaactaatgagtcatgcgggcccatgatgagctgtaacttctcaagaggaaagaaccccgtagaaaactatagctggaaggatctaggttgacctgtctgtgattta

SEQ ID NO: 2165 - DNA, 303 bp, Homo sapiens
gaaggaaattggaaaaaaaaatttaaacaaatgataatgaaaacacaacattccaaaaactatgagatgcaacaaaagcagtactaaaagggaagttaatagatacaagtgcccacatcgtaagagaaaaaaaacttgaaataacctaatgatgcatcttaaataactagaaaagcaagagcaaaccaaacccaaatttatgagaagaaaagaaagaataaatatcatagcagaaataaattaaattgaaacaaagaaaacaatccaaaacatcaatgaaatgaaaagttggtgtgttgaaaa

SEQ ID NO: 2166 - DNA, 314 bp, Homo sapiens
tcttcactgatgatatgattctatacctggaaacccctaaacatttcaccaaaaagcttctagacttgatgaacaacttcagtaaagtttcaggatacaaaatcaatgtgaaaaaatcaataccatttctatacaccaataatgtttaagctgagaaccaaaccaagaacataatctcatttacaatacacacacacacacacacacacacacacacacacacacacacacacagagataggtatatatctacgcgggggggtgagagatctctacagagagatctacaacactctggtgagagaaatcagaga

SEQ ID NO: 2167 - DNA, 320 bp, Homo sapiens
ggcggcgcgggtcctccatatgctgagcgccggtcccctgggcccacttttctttctctatactttgtctctgttgtctttcttttctcaagtctctcgttccacctgaggagaaatgcccacagctgtggaggcgcaggccactccatctggtgcccaacgtggatgcttttctctagggtgaagggactctcgagtgtggtcattgaggacaagtcaacgagagattcccgagtacgtctacagtgagccttgtgggtgaaggtactctacagtgtggtcattggagacaaggtgaccagagaggcccaagtacgtcg

SEQ ID NO: 2168 - DNA, 313 bp, Homo sapiens
gcggcgcgggtcctccatatgctgagcgccggtcccctgggcccacttttctttctctatactttgtctctgttgtctttcttttctcaagtctctcgttccacctgaggagaaatgcccacagctgtggaggcgcaggccactccatctggtgcccaacgtggatgcttttctctagggtgaagggactctcgagtgtggtcattgaggacaagtcaacgagagattcccgagtacgtctacagtgagccttgtgggtgaaggtactctacagtgtggtcattgaggacaagttgacgagagagtcccaagt

SEQ ID NO: 2169 - DNA, 341 bp, Homo sapiens
ggatctcgctccgggtcccgcagtgggtcccggagaggaagcttcgacgccacagggaattcttcctactcttattcctactcatttagcagtagttctattgggcactagtagtcagttgggagaggacgctataccttgacttcatttataagactatccactttattaagtagtagaaaacaaaataaaggtgctgtgtttatgatagacaagatattctcctgcttacaacataacttaagacagatgggggggcttttacgcatcgcgtctttcgggctctatgttctccttatcccaaaaattcgattttccgcgttgtgtatataaagtgaggg

SEQ ID NO: 2170 - DNA, 372 bp, Homo sapiens
  misc_feature (1)...(372): n = A,T,C or G
tacggctgttagaatacgacagaacgggattgtgtaaggagaccaatctatttagatacgagactacctatattctaactggatctctgagctctgggcagagccatcactggaatcctgggtctccaccaagggagaattattatgaggctagaccacacgatgcttttacagagcacttaaaaaaaaatcttttttttttgagacaaaaatttttttttttttgaaagggagtttggttttgtcccccaggttgaagggtaaggccagaatttaagctcattgcaggctttgggcccggggttaatgccgttttcctgcctcaccctccaaagtatctggaactacagggccccgccaccaaaccgggtn

SEQ ID NO: 2171 - DNA, 328 bp, Homo sapiens
gcggcgcgggtcctccatatgctgagcgccggtcccctgggcccacttttctttctctatactttgtctctgttgtctttcttttctcaagtctctcgttccacctgaggagaaatgcccacagctgtggaggcgcaggccactccatctggtgcccaacgtggatgcttttctctagggtgaagggactctcgagtgtggtcattgaggacaagtcaacgagagattcccgagtacgtctacagtgagccttgtgggtgaaggtactctacagtgtggtcattgaggacaagttgacgagagagtcccaagtacgtccacggtcagc

SEQ ID NO: 2172 - DNA, 286 bp, Homo sapiens
  misc_feature (1)...(286): n = A,T,C or G
acaacctggaaaggtcttcctcactacacggagtagtcaaacagtcaaaaatcaaagacaaagacaaaattctaaaacagcaagaaaaaaagtatctagtcacttataagataaatcccaactgacaaacaacaaatttctcaacagaaacctcacaggccaggaaagaatgggttgatacattcaaaatgctgaaacaaacaaaacaatgccaaccaaaaatactatacccagcaagggtaacctttataaatgaagggaaaataaagtatttctcagataagcn

SEQ ID NO: 2173 - DNA, 360 bp, Homo sapiens
aaaaccactttaatacagtttcaagatacaaaatcaatgcacaaaaatcagtagcatttctatacaccaacagcatccagggtgcacgtggaataaaaaacacaatcctactcaaaatagccacaaagaaaatgaaattatctaggaatacagctaaccaaagaggtgaaagacctgtacaaagagaaccaccaaacactgctgaaagaattcagaaatgacacaaatgaacagaaaacattccatgctcatggattgaaagaatcaatgtcatttgaaatgtccatactgcacgaagtaatttaaagattcaatgctattcctatcaaactaccaatgtcattcttcataggattaaaa

SEQ ID NO: 2174 - DNA, 345 bp, Homo sapiens
aaaaccactttaatacagtttcaagatacaaaatcaatgcacaaaaatcagtagcatttctatacaccaacagcatccagggtgcacgtggaataaaaaacacaatcctactcaaaatagccacaaagaaaatgaaattatctaggaatacagctaaccaaagaggtgaaagacctgtacaaagagaaccaccaaacactgctgaaagaattcagaaatgacacaaatgaacagaaaacattccatgctcatggattgaaagaatcaatgtcatttgaaatgtccatactgcacgaagtaatttaaagattcaatgctattcctatcaaactaccaatgtcattc

SEQ ID NO: 2175 - DNA, 358 bp, Homo sapiens
gcaagtaaagcaggtgcatctaaaccaggaaggagaacatacttggcccttgcttcttcccatttttgttttttctcatcaaaagctttcttcataatttggtaccactttctgaaatcaaaccatggcttatctgaaagaaataaaatccaagattattaaccaaataaaccacactataataatatacattgttcatctgagttttcattaattgactgcactgggcagttggtgtgagtgtgtgatcaagatgtagacattagagagacaacagaactgaatgcagtaaagtataaaaactcactcctcactctttcactccatacagggattattctccattattctctggcga

SEQ ID NO: 2176 - DNA, 407 bp, Homo sapiens
  misc_feature (1)...(407): n = A,T,C or G
cgttgctgtcggttgctcctggtcactccctttatagccattactgtcttgtttcttgtaactcaggttaggttttggtctctcttgctccactgcnnaaaaaaaaaaaaaaaaaaaaaaaatttacccccttaaaaaaataaaaggggggaaaaccctcccccccaatttttggggtttttgaagaggaatttttttttttccccttggggggaaaaaaatttttttttttggccattttaaacccccccctttttggggggggcccttttttggaaagggccccttaacaaaaccttaaccggggtttttttaaccccggggggggggggggggcggggcaaaaattttttttggggcccctggcggggttttttttttttttaaaagaaattgggggcccccat

SEQ ID NO: 2177 - DNA, 328 bp, Homo sapiens
aattctcaataattaagtatagaaggaaggtaccgccaaacaataaagaccacatgtgacagactcacggctaacatcatattgaatggggaatagctgaaagtaagaactggaacaggacaaggaggcccattttcactactgttttgtgatatggtactggaaatcctagtcagaataattagggaagagaaagaaataaggggaatccaaattagaaagaaggaattcaaattgtccctgttttcacaggacatgatcttatatatagaaaaacctagactccaccaaaaaactcttagaactgataaacaaattcagtaaagtt

SEQ ID NO: 2178 - DNA, 305 bp, Homo sapiens
gggccccggaaatgcgtgttctagctttctgtgtgcttaggtgcccgagctactgagggtctaagtccgggcagccgaagagtgtggttagcaagatgaacaaagatgcgcagatgagagcagcgattaaccaaaagttgatagaaactggagaaagagaacgcctcaaagagttgctgagagctaaattaattgaatgtggctggaaggatcagttgaaggcacactgtaaagaggtaattaaagaaaaaggactagaacacgttactgttgatgacttggtggctgaaatcactccaaaaggc

SEQ ID NO: 2179 - DNA, 394 bp, Homo sapiens
cgtggctgtcgaccgtttatatgtttttcttttggtctgaaatacttctgaacagaggttattttttttagaaaaaggccgagacggggctttactatgttgcccaggctgctgtctaactcctgggctcaagcgatccttctgccttggcctcccgaagtgctgggattgcaggcataagctaccatgctgggcctgaacataatttcaagaggaggatttataaaaccattttctgtaatcaaatgattggtgtcattttcccatttgccaatgtagtctcacttataaaaacaaacagaaacaaaaacgggaaatttccttcaacggcctttattgggggtaaaggggatccttaacccccttttttatggaactctcaaagcggggtccg

SEQ ID NO: 2180 - DNA, 240 bp, Homo sapiens
gagtgcggtcacatacttccagaagagcggaccagggctgctgccagcacctgccactcagagcgcctctgtcgctgggacccttcaggtaggacagctcccaacgctgtggggactctcagcaaaacttctccttcctttccacggctctgcttcttctgacctcatcttagctttgctttttattttcttccttcgctatttttctatgatcctctaagaaccaagtccttgaaactt

SEQ ID NO: 2181 - DNA, 398 bp, Homo sapiens
gggaacttctgtgttattttactcttaaaaccaaactctaccttttcttggtgtttttttttttttttttgggaacccttcaaattcaggcaaagaagggggttaattttaaaaaccagggaaaaaacggcccccccatttggttgacgaagggttttaagggcctaactgggccccagggcacacccgggccaaattaagcccggaatgttgcccgggcccgaaaaagcccggggcccctgtttctttatggggaattaaagggcggggggtaaaggaaccattcctttttctgggaaataaaaaccgcaaagttgccatggcccgcccctttttttgtttcggggaatccaatgggggggaacttggggaaaacgggccttgggaaaaaaaaaaaa

SEQ ID NO: 2182 - DNA, 310 bp, Homo sapiens
ggattgctctagctatttggggtctttcatgattccctatgagttttaggattttttttctatttctgtaagaatgtctttggtattttgatagggattgtgttggatatgtagattgttttggatagtatagagattttaataatattcattcttctagtccatgagtgtgaaatatatttccatttttttgtgtcctcttcaatttattttatcagtgttttgtaggttttcttttagagatttttcacctctttgatttaatttattcctgttttgtagctattgtaaatgggattgttttcttgat

SEQ ID NO: 2183 - DNA, 226 bp, Homo sapiens
  misc_feature (1)...(226): n = A,T,C or G
tgnnntttntatnttacttacagaccgaagcctcaacatcacttttttttaccctgccggaggaggagaccccattctataccatcacgtattctgattttggggtggccctgaagttttttttttattctatctggcttcggactaatctccattttgtgtgttgttattctggccagaatatccatttttttacattgggtgcggcctgggcttccttgtactg

SEQ ID NO: 2184 - DNA, 403 bp, Homo sapiens
tgacgctaccagctgagttacaagagaaaatgatcacatgcatcagaggcttggagaaagctaaagtgattcagccaggctacggtgttcagtatgattacttagatccccgtcagatcaccccttccttggagactcatttggttcaacgactcttctttgctggacagatcaatggcaccactggttatgaggaagctgcagctcaaggtgtgatagccggaatcaacgccagtcttcgggtcagtcgcaagcctccctttgtggttagccgaacagaaggttacataggagtcttgattgatgacctcactactctgggcaccagtgaaccataccgcatgtttaccagccgagtagagttccgtttgtcactgcgccctgataatgctgacagccggct

SEQ ID NO: 2185 - DNA, 397 bp, Homo sapiens
  misc_feature (1)...(397): n = A,T,C or G
cgttgctgtcgcgacctgcttctgggtcggggtttcgtacgtagcagagcagctccctcgctgcgatctattgaaagtcagccctcgacacaagggtttgccgttgctgtcgctagcagtggaagaagactgaatatctcgtataccagaaacatgactcttaaagatggtaaaaacaatgtagccatagctgtaacgtataaccatgatgggtcttatagcatgcagattgaagataaaactttccaagtccttggtaatctttacagcgagggagactgcacttacctgaaatgttctgttaatggagttgctagtaaagcgaagctgattatcctggaaaacactatttacctattttccaaggaaggaagtattgagattgacattccagtcn

SEQ ID NO: 2186 - DNA, 307 bp, Homo sapiens
ggctgactctcttttcggacttagcccgcctgcacccaggtgaaataaacagccttgttgctcacacaaagcctatttggtggtctcctcacatggacgtgcatgacattgggtgctgaaacccgggacaggaggactccttcgggagaccagtccccttcccctgtcctcgccctcactccttgaggagatccacctgcaacctcgggtcctcagaccaaccagcccaaggaacatctcatgaatttcaaattggatcttcttgacttagcagctgaagactgatgctgcccgattgccttggaaa

SEQ ID NO: 2187 - DNA, 313 bp, Homo sapiens
aaagaccattatgggccactggacaaacacatgaatacacagaccattgacactataaagcaaccacacactcgagaggacagtaataattagctgacgacacaagatcaggatcagagccacacctataaactctaaccttgaatgtaaatggcataaatatcctgattaaaaggcacagagtggcaagctggataaagaagaaatacccaatcgtatgttgtcttcaagagacccatttcacatgcaatgacacacataggctcaaaataaagggaaggagaaaaatctggcacccaagaggaaaacagaa

SEQ ID NO: 2188 - DNA, 364 bp, Homo sapiens
tgcgtccagaggacctgtccggcagcacctccatgcctgagcccaagccagggctcatgtgaaggctcctgaagtaactccaagcccagaggagcagtgggacaaggcagggagacaggggcggcaacgcgagctcttcaggggaggctcctggactgcctaagcattgttcctcccacccactgggcagaggccccctacccccaggcagcgccagctggaccaagccaggaaccacgagccagcggcctgagcactcaccggtctccacatcctgcacgtagaagtgcaggtcatcagtgatctcagtcacaaacacgggcttgtagctagcagatcgctccttgtctcagcactggcatca

SEQ ID NO: 2189 - DNA, 176 bp, Homo sapiens
tgggagggtgaggagggcatatcacttgaatccaggtgttcgagatcagtgtggacaacatgatgaaaccctgtctctaccaaaaatactgaaattagctgtgcatggtggcactcgcctgtagtcccagctatttgggggactaggccagaggatcacttgagccagggaggttg

SEQ ID NO: 2190 - DNA, 178 bp, Homo sapiens
  misc_feature (1)...(178): n = A,T,C or G
ttggaaaccacagtttcatgcccatcgtcctagaattaattcccctaaaaatctttgaaatagggcccgtatttaccctatagcaccccctctagagacgggggncnnannatnntnntnnnnaaaaagggggtgtttttaaggaccccaacagatgagctccgctctgcagctggcg

SEQ ID NO: 2191 - DNA, 354 bp, Homo sapiens
agtgggcatggctggggctgcacactccatggagccaacggaagccaagaacaggcgggagccctactcccttctgagttggcagggccagtgcagctgcagccaaccagctgtagctgtggacccaggcatccctgcactcttgactcaggaagccccctgcccccacaggctcaaaaatgcctgctcccactgcctggcctcttcctgttcctggtgcccgctccaattttggagcaaagttgaggctgagcccaggcactgtcgcaacctgccacagtgcacgcatgctcagggcagcactgatacaccagccccctgccaacttggccctctctgggctttgggcagaga

SEQ ID NO: 2192 - DNA, 313 bp, Homo sapiens
gtgatccacacacctcggcctcccaaagtgccgggatgacaggtgtgagccactgtgcctggcctgaaatgattatgtctctatgtataaataaatgaaaatcaaggccaggcacggtggctcatgtctgtaatcctatcactttgggtggccgtggcaggtggatcacaaggtcacgagttcaataccatcctggccaatatgatgaaaccccatctttattagaactacccatatttatccggtcgtgatggagaaaacctgtagtcccagctactccggaggctgttggaataacttttttaatctttct

SEQ ID NO: 2193 - DNA, 327 bp, Homo sapiens
tgttgcagtcgaggactgcaacagcccactgacagcactggacagatcaccgcagaaaactaacaaattctcgacttaaattgaagttttgaccaaatggacgtaatacacacgtacagaataccctacccaacaaccacagaatacacattttactcatctttgcatgctctaaaaatgaccacatgctcagtcataaagcaagtctcaataaattcaaaaaagcagaaatcataccaagcatctgtttggaccacagttgaataaaattagaaatcaataccaagaataactctgaaagccacgtaagtacatggaaatgaaacg

SEQ ID NO: 2194 - DNA, 387 bp, Homo sapiens
  misc_feature (1)...(387): n = A,T,C or G
agataaacataaatggaaagatatcttgtgttcatggattagaaggcttaacattattaaaatagctatactaccacaaacaatctacagattgttattccaatccaaatccccaaagtatgttttacagaaatagaaaacaccatcctaaaattcagatgcaatgacaaaagagcaatagccaaagcaatctcgagaaggaaaaacatagttggaggtatcacatttcctggtttgaaaatagattacaaagtcatggtaattaaaacagtatggcacaggcataaagacacatatagaccaatggaatagaatacaaagcccagaatgaaattcacacacatatggtcaactgcctttgacaaaggttcgaanagtacacaacag

SEQ ID NO: 2195 - DNA, 256 bp, Homo sapiens
  misc_feature (1)...(256): n = A,T,C or G
accttactaccagacaaccttagccaaaccatttacccaaataaagtataggcgatagaaattgaaacctggcgcaatagatatagtaccgcanaaaaaaaaaaaaaaaaaaaaacctttggggggcggttttttcggaaatcccaaccgggaaaaaaccttggggggggtgggcccacccccccctaaaagggcggggaaaaaagggtttttttgggaaattgggagggctttgggttttttgggaccccataaa

SEQ ID NO: 2196 - DNA, 330 bp, Homo sapiens
gttccctagaacgtgcaatgccacagtcagagacgttcaaactggaagccaggacaacaagatgctgacttaaagctgtggacagccttctccaagatggcagaagaagactccatgtcataatgactcttaccccttttaatttttttttacttatgcctgcctctttcacttgggaagaaaatgctggcaccacaatttcacaattcgcatcttttggggaaaaaaggctggatggttcacccctttttagctgctgttatttgtttattttggcgcccgccttttttacttggcgtgaagagggctgctctttaaaatttccacacc

SEQ ID NO: 2197 - DNA, 319 bp, Homo sapiens
ggtacaagtgtccaatggtgctatattctttcctgatttttggctaccctaaatccattatgcagatagggctggtgttctgccagtttgcacatcttcccactaaggtatgctctgttgtatctttcaggcttattcaaacctccttagagctaacatggatgggttgaagaagagagacaaaaagaacaaaactaagaagaccaaagcagcagcagcagcagcagcagcacctgccgcagcagcaacagcagcaacaacagcagcaacaacagcagcaacagcagcacagtaaagggcatacatttcctgctttcac

SEQ ID NO: 2198 - DNA, 380 bp, Homo sapiens
tactacggttgcgacatgacgacagacagtgatcagggcgcacacaccccaactgacaggcggtgcctctgctggcttatatgtgcttgtctggcagctatggctagagctgtggccctcccaacctgcaactggcgatctgacaacgggcagacgcgtctcctctagtgtttccgtgacccctgacccgcgagcacgctatctgggaggcaccccctagtatgggcagactgacacctcacacggccgggtactcctctgagacaaaacttccagaggaacgatcagacagcagcattcgtggatcacgaaaatccgctcttctgctgccaccactgctgtgacccaggcaaacagggtctggagtggacctctagcaa

SEQ ID NO: 2199 - DNA, 346 bp, Homo sapiens
atttttctcttccccaccacagcatctttgcgtgtgtgtgtcggcgggtgttggagggggcaagttaagcctcattccctataatttggaacattccttcggatttgatcgagtcagatagagttggtcaaacccaatgggaaaaagactaaaggaactacaaaacagaaacaaacaaatgacaacaacaacaaaaaaacaggtaagcaaaacaaacaatcaattgcacaacttatacaattagtgagcactctaatggtaaggagaaattaagtccagctggttgttaatcttaactttggccaagacaaaccccagttcagttacttacctgcagacgggtctc

SEQ ID NO: 2200 - DNA, 144 bp, Homo sapiens
  misc_feature (1)...(144): n = A,T,C or G
cactacctataaaatcccaaacatataactgaactcctcacacccaattggaccaatctatcaccctatagaagaactaatgttagtataagtaacntggagaaaagggccattttttggaattaatagggggggggttttttt

SEQ ID NO: 2201 - DNA, 316 bp, Homo sapiens
atctgtgaaaagatatttggtaacacattaaggcctatggtgaaaaaggaaatatcttcagataaaaaccagaaagaagttttcttagaaactggttttgcttgtgtgcatttatctcagagagttaaaactttctttggattcagcagtttagaaacactgtttttgtccattctgtgaatggacgtttgggagctcattgaagccaacgtcaaaaaggtgactaacccaggattaaaacttgaagaaagctatctgagaaatagctttctgatgtgtgcattcatctcacagagttaaaactttctcttcattc

SEQ ID NO: 2202 - DNA, 366 bp, Homo sapiens
aaagatctcaatgaaggatctaacatcacacccagaagaaacagaaaaacaagaggaaatcaaccacaaagctagcagaaaaaaagaaataaccaaaatcagagcctatttgagtgaaatggaaatgacaaaaagatacaaaaaatcaaggaaactaaaaattgtatttttgaaagactaaataagattgatacaccagtaactagactaatacagaaaaaaagagagaagatccaaataaacacaatcataaatcacaaggaggacactaacaccaaccctacagaaatacaaaagatttctcacagactattatgaattctctatgcacacaaagtggaaagccagaagaattagataaattct

SEQ ID NO: 2203 - DNA, 451 bp, Homo sapiens
  misc_feature (1)...(451): n = A,T,C or G
gtcgtggaggtggatctggcaattttatgggtcgcggagggaactttggaggtggtggaggtaattttggccgtggtggaaactttggtggaagaggaggctatggtggtggaggtggtggcagcagaggtagttatggaggaggtgatggtggatataatggatttggaggtgatggcgncncctatcgcggcgcccctggcccttgcctcctggcctgctatcctggcggcgcgcccccctgtctcccccacgcgcttcgccctggtggtacccggaggatttcactcgaacgtcctccacggcctgttgccgccttgtccctttcgcggcctccctttctcctggggcccattctgccggagaatngactatctctcccccctgacactagcttccgtcactccctgaccccgcancctatctcttcctcccaccggggccccccacn

SEQ ID NO: 2204 - DNA, 385 bp, Homo sapiens
  misc_feature (1)...(385): n = A,T,C or G
ttagcagaaacgatagcctgttatagtggacagcttgctgctctgacggatgaaaacacaacgctccgttctaaactggagaagcaaagagagagcgggcaaagactggaaacagaaatgcaatcataccgttgtagactgaatgctgctctatgtgatcatgatcaaagtcactcatcaaaaagagaccaagagcttgctttccagggcacagtagataaatgttgtcatttacaggaaaatttgaattctcatgttctgattctttctctgcaactttctaaagctgagagtaagttcagagtcctcgaaactgagctccattacacaggagaggctctgaaagaaaaggctttggtttttgaacacgggcaaagggagctan

SEQ ID NO: 2205 - DNA, 417 bp, Homo sapiens
cgttgctgtcgggcaagcgttcgattttttgtcgttggatcgcgagcggtgtctgcttgtgccgccgagggctcccaggacagggcagggatctagggggtttgcgcacctgctttttaatgccccgccccccctttttttttttaaaggggggggggtgaaagtgagggaggaaaagggacaaaatactgactggaacgtaaattcgagcatttcttatgcgaagagcggataaccagttccggattcttttttaagtttctccattagataaatttaattttcaaaggctccggtttgcaggctaaattttgaaactagcccggggtttggcaaaatttgactgaatcctggggggagaggctggacccacgcccaagggtatctagaatattgagcccggcagttcaaaccagg

SEQ ID NO: 2206 - DNA, 410 bp, Homo sapiens
  misc_feature (1)...(410): n = A,T,C or G
cgttgctgtcgggcgggggtccgggagaagcggcggggtcgcgggacaggagaagcggaggaagagtatgtggggccccggctgagccgacggattttgcagcaagcacggcagcaacaggaggaactcgaggccgagcatgggactggggacaagcccgcggcgccgcgggaacgcaccacgcggctgggtccaagaatgcctcaggatggatcagatgacgaggacgaggagtggcccaccctggagaaggctgccacaatgacagcagcgggccatcatgcagaggtggttgtggaccctgaggatgagcgtgccatagagatgttcatgaacaagaaccctcctgccaggcgcaccctggctgacatcatcatggagaagctgactgagaagcagacagaggttgn

SEQ ID NO: 2207 - DNA, 413 bp, Homo sapiens
  misc_feature (1)...(413): n = A,T,C or G
ggcacgagaggcactgagttcatttcactgacacggcccctggactcccacctagaacatgtggattttagttctctattgcactgtctcagttttgaacagatacttcagatctttgcctctgccgtgctggagagaaaaatcatcttcctggcggaaggtctcagcaccttgtctcagtgcatccatgctgctgccgcactgctctaccccttcagctgggcgcacacctacatccctgttgtccctgagagccttctggccaccgtctgctgccccacccccttcatggttggagtacaaatgcgcttccagcaggaggtcatggacagccctatggnagaggtcctgctggtcaatctttgtgaaggaaccttcttaatgtcggttggtgatgaaaaagacatcctgct

SEQ ID NO: 2208 - DNA, 328 bp, Homo sapiens
gccaacagtaagttttttacaatagccatcctaatgagtgtccatatacggttttttttttttggttggaaagggagtctggttttgttccccagcctgaagggcaggggggcaatttttgttaattgaaaactccgcctccaaggttaacgcatttttctggcctaaccctccaaggtagctgaaactacaaaggcccgcccccaccccgggctaattttggatttttaagaacaaacggagtttatttacgtgggccgggtgggtctaaaactccggacctaaggggacccccccgcctggccctcccaaggggcgggaataacgg

SEQ ID NO: 2209 - DNA, 327 bp, Homo sapiens
cactgcaaggtccacctcccgggttcacgccattctcctggctcagcctcctgagtagctgggactacaggcgcccgccaccatgaccggctagttttttttggatttttagtaaagaaggggtttcaccgtgttagccatgatggtctcgatctcctgacctcgtgatttgtccgcctcagcctcccaaagtgctgactctgtgcgcgggcagttgctaatcggactgatgcgtgcttcattcgagttattggatctgagcttgtacagaaatacgtcggtgagggggctcgaatggttcgtgaactctttgaaatggccacaaca

SEQ ID NO: 2210 - DNA, 397 bp, Homo sapiens
cgttgctgtcgctccctatctaccctcaccccacgagacagccccttcaggtatgtgtgtgtgtgcatgtgtgtgcatgtgtgtgcatgtgtgtgcaggggtgtgtgtgtgtggggggggttcccaaatattcagggcaagggaccagtcggaagggattctggctattgggggagcccagagacaggggaaggcagcctgtccatctgtgcataaggagaggaaagttccagggtgtgtatgtttcaggggcttcacatggaggagctgcagatagatatgtgtttctgtgtatgtgtatgtctgcctttttttctaagggggggcttctacaggcttttgaaagtaaggtggaagtggtaaggctgataagaaaaaacaaacttattttgtagcg

SEQ ID NO: 2211 - DNA, 337 bp, Homo sapiens
aacaaaacaattatcagccaagaattttgtatccagtcctatgtttgccctccttaaacaaaacaattatcagccaagaattttgtatccagcaaaactaggcttcataaatgaaggaaagataatctttcagacaaacaaatgctgagagaatttgccactaccaagccaacactataagaaatgctaaaaggagctctaaatcttgaaacgaatcctcgaaatacacaaaaatagaatgttcttaaggcataaatctcacaggatctattaaaacacacacacacacacacacaatgaaaaaaaaacacaaggcttttaggtaacaaataccacg

SEQ ID NO: 2212 - DNA, 334 bp, Homo sapiens
gaacaaaccaacatttgagccaggaataactagagaggaacaatggggttattcagaggttttgttttcctcttagttctgtgcctgctgcaccagtcaaatacttccttcattaagctgaataataatggctttgaagatattgtcattgttatagatcctagtgtgccagaagatgaaaaaataattgaacaaatagaggatatggtgactacagcttctacgtacctgtttgaagccacagaaaaaagattttttttcaaaaatgtatctatattaattcctgagaattggaaggaaaatcctcagtacaaaaggccaagacatgaaaacg

SEQ ID NO: 2213 - DNA, 322 bp, Homo sapiens
gagcactttgaggcctatggtgaaaaagaaaatatcttcagataaaaactagaaagaaactttctgagaaactgctttgtgatgtgtacattcatctcacagagttaaaactttcttttcattcagcattttgggaagtatgtttttgtccattctgcaaaaggacatttgggagctcattcagaccaatggcaaaaaagaaaatatcccaggataaaaactagaaggaagctgagaatccatttgtgatgtgcgcattcatctcacagagtgaaaattttcttttgatacatcagtttggaaacatggtttttgtagaacc

SEQ ID NO: 2214 - DNA, 295 bp, Homo sapiens
gctaaacctagccccaaacccactccaccttactaccagacaaccttagccaaaccatttacccaaataaagtataggcgatagaaattgaaacctggcgcaatagatatagtaccaaaaaaaaaaaaaaaaaaaaaaaaaaaaggggggggttttttccggaaaccccaaagggaaaaaaacctttgggggggggggaaaacccccccttaaaggggggggaaaaaaagggttttttgggaaaattggggagggtttggttttttttgaaaccattaaaagggggaaaaaaaaa

SEQ ID NO: 2215 - DNA, 314 bp, Homo sapiens
  misc_feature (1)...(314): n = A,T,C or G
gatttgccatagtagttaagataatacaggctttgccctttcaaatgccataggtgttattgactagtaccatataatcgcctttaattcttaaactagttcacgtcatacattttaattatcctagtctctgtaattgatatttatcatgaagattgcattgctcttatttcagaaaaatatgttgagaaactttttggagtaaacaaagatcgaatgtcaatggaccagatggctgttctccttgttagcaatatcaatgaaagtaaaggtcatagtaagtacatatataantgtgtgtgtgtgtgtgtgtg

SEQ ID NO: 2216 - DNA, 313 bp, Homo sapiens
actgaatgactgattggtcaatgaaaaaaattaagaagaaaaattttaaaattctttaaacaaatggaaatggagacacaacataccaaagcctatgggatacagcaaaagcactactaagaggaaagtttatagcaacaagtgcctacatcaaaaaagtagaacttccaataaacaacttaatgatgcatcttaaagagctagaaaacccaaatagtagaggaaaagaaatagtaaagaccagagcagaaaaaaataaaattgaaattaaaaaattacaaaagatcaatgaaacaaaaagttggatgtttga

SEQ ID NO: 2217 - DNA, 332 bp, Homo sapiens
gagcactttgaggcctatggtgaaaaagaaaatatcttcagataaaaactagaaagaaactttctgagaaactgctttgtgatgtgtacattcatctcacagagttaaaactttcttttcattcagcattttgggaagtatgtttttgtccattctgcaaaaggacatttgggagctcattcagaccaatggcaaaaaagaaaatatcccaggataaaaactagaaggaagctgagaatccatttgtgatgtgcgcattcatctcacagagtgaaaattttcttttgatacatcagtttggaaacatggtttttgtagaacctgtgaagggg

SEQ ID NO: 2218 - DNA, 327 bp, Homo sapiens
gatatacttagaacattttatccaacagcagcaggacacacattcttcttgagagcagatgagacattctccaggacagcttatcttttggaccacaacacaagttttaaaacatttaagaagactaaaataatatcaactatcttttccaattgcaatagtatgaaactagaaatcaataatagggggaaaactagaaaacacaaatatgtggaaatgaaacaatgcattcctgaacaatcaatgggacaaaagaggaatcaaaatataaattaaaaattaccttgaaccaataaaaatggaaacacaacacatcaaaacttgtag

SEQ ID NO: 2219 - DNA, 416 bp, Homo sapiens
tcccatcgattcgaattcggcacgagctggcccggtggcgccagagctgtggcgcgtcgcttgtgagtcacagctctggcgtgcaggtttatgtgggggagaggctgacgctgcgcttctgggcccgcggcgggcgtggggaaaaaaagaaaaaaaaaaaaaaaaaaaaaaaaaaaaaaaaaaaaaaaaaaaaaaaaaaaaaaaactttctccaaaaaaaaaagaaatgtatcataagccatgcaacaattacaaacgcacacgctgggtctcccaacaaacacaaacccaaaatattttacaaagcttttcttttggaaaagacccagacccacttattaataggaaacccaaaaaagggcaacaagcaaacaaaacacagctttaccacttgtataagtgtgacctacaggggg

SEQ ID NO: 2220 - DNA, 339 bp, Homo sapiens
ggtctttcgaacaacaatattcaccaattcccaggattgaagtggatggtccctttggcacagccagtgaggatgttttccagtatgaagtggctgtgctggttggagcaggaattggggtcaccccctttgcttctatcttgaaatccatctggtacaaattccagtgtgcagaccacaacctcaaaacaaaaaagatctatttctactggatctgcagggagacaggtgcctttttctggttcaacaacctgttgacttccctggaacaggagatggaggaattaggccaagtgggttttttaaactaccggttctttctcaccggatgggacagct

SEQ ID NO: 2221 - DNA, 124 bp, Homo sapiens
ggacgcttttcatctgtcccgctgcgtgttttcctcttgatcgggaactcctgcttctccttgcctcgaaatggaccccaactgctcctgctcgcctgttggcttctgtgcctgtgccggcttc

SEQ ID NO: 2222 - DNA, 385 bp, Homo sapiens
  misc_feature (1)...(385): n = A,T,C or G
caaacagtgtttccaaacagtgaatgaaaagaaatgtttaactctgccagatgaattacacaacacatagcaatttctcacatagcttccttctcgtttttacccttaggtagtccttttttgccattggcctcaaggagttccaaaagtctatttgtagaatggacaaaaagagtgtttgcaaactactcatacaaaagacatgtttaagtcagcaagatgaaagcacacatctcanagaggtttcccagatagcttccttccagtttttatcctaggatattccttttttctaccttggcctcaatgatgtccaaaatgtttattttcacagtggactaaaacagtatttccaaactgctgaaacaaaagaaagatttaactt

SEQ ID NO: 2223 - DNA, 337 bp, Homo sapiens
ctcacataaacttaaggtaaaggggtggacaaagatattccatgcaaatggacaccaaaagtgagcaggagtagctattcttatatcagacaaaacaaaccttaaagcaacagcagttaaaaaaagagggaccttatataatgataaaaggactagtacaaaaggaaaatatataatgataaaaggactagtacaaaaggaaaatatcacaatcctaaatatatatgcacctaacactggagctcccaaatttataaacaattactgctagacctaagaaatcagatagatggcaacacagcaatagtgggggactttaatactccactgacagcac

SEQ ID NO: 2224 - DNA, 418 bp, Homo sapiens
aaacaaaatgcccatgttggtcctctgccatggacctgcgatattctggactatttctgcgtttatttgcggccgagtgtaacaaccatataataaatcacctcttccgctgttttagctgaagaattaacacaaaaaaaaaaaaaaaaaaagaaaaaaaacaaaaaaaaaaaaaaaaaaaatggaaatctgaaagccatcccaaaagaagacccacccccaaaagaaagtagaaccaaaaccctggagagcctcccctaccataggactctctcgctagatccgtgactataaaaaaaaccggggggaagagccgggccaccccattctacaggccaactagggaccctcgagatacccccttatttctggcgccctgagagaaggggccccaaacggaccccgaaatttacccccg

SEQ ID NO: 2225 - DNA, 328 bp, Homo sapiens
ttacacatcagtttctcagaagacttctttctagtttttatctgaagaggcttccttttttaccatgggcctcaatgctcagtgaaatattcctttgcagatcctacaaaaacagtgtttccaaacagctgaatgaaaagaaaggtttaactctgtgagatgaatgcacacatcacaaagcggtttctcagataggtttcttcgagtttttatcctgggatattcgctccttcgccattggcctcaatgagctccaaaatatccattctcagaatggacaaaaacagtgtttccaaactgaggaatccaaagaaagggttaactctgg

SEQ ID NO: 2226 - DNA, 390 bp, Homo sapiens
ctaaaaatcaatgattggaggaatttgggaaactatacaaatacatgaaaattaaacaatatgcttctgaatgaccagtgggtcaatgaagagattaagaagaaaattaaaaattttcttgaaacaaacaacaatgaaaacaaaatatagaaatcctatgggatacagtgaatgcagtactaaaaggaaagtttatagtcataagtgcctaaatcaaaaaatggaaaaacttcaaataagccatgaaatgatgcatcttaaaaaagtaaaaaagtaatatcaatctaaagtcaaagttagtagaataaaatgagatcagagtagaagtaaatggaattgaaatgaaaataatacaaaagatcaatgaaacaaaaagctgcattaaaaaat

SEQ ID NO: 2227 - DNA, 336 bp, Homo sapiens
ttggtgggaaattcaatactctaagcattagactgttgatctagaatattaacagatgaacactgtatttaaactgcacataggaccaaatggacctaacagatatttacagaacatttcatctgacagttacagaacaaacattcttctcatcagcacatgaaacattctccagaagagagcatatgttaggacacaaagcaagtctcaacaaattaaaaaaattgaaatcatattgtttcttctcagaccacaataaaataaaactagaaatcaataacaagaggaactagggaaactgtacaaatacatacaaattaaacaacatactcctgg

SEQ ID NO: 2228 - DNA, 384 bp, Homo sapiens
  misc_feature (1)...(384): n = A,T,C or G
cgttgctgtcgaattcggctggcgtttccgagaccgcggactcccgtagggtccccgtggccccgagttgtagtcgggacaccccggccgcgggtgatcgtcgggtctccacgcgcccgggtcgctgacgcggatccggcctcggcgccttctcagggcgccctgcaaggccgcaggcaggatgaacattctggcacccgtgcggagggatcgcgtcctggcggagctgccccagatttaagatctccaaggtcattgtggtgggggacctgtcggtggggaagacttgcctcattaataggttctgcaaagacacctttgataagaattacaaggccaccattggagtggacttcgagatggaacgatttgaggtgctgggcn

SEQ ID NO: 2229 - DNA, 381 bp, Homo sapiens
tcagtagcatttctataggccaacagtgaacaatatgaaaatgaaattttaaaaagtaatcccatgtacaataaccacacataaaattaaatacctaggaattaacttaaccaaagaagtgaaagatctctataataaaaactataaaacgctgatgaaggaaattgaagaaaataccaaaaaatggaaaaacattccatgttcatgtgttggaagaatcaatgttgctaaaatgtccacactaccctaagcaatctacagattcaacgcagtccctatcaaaatactggacatttttcacagaaatagaaaaaacaattctaaaatttatatgaaaccacagaagacccagaatagccaaagctaccctaagcaaaataa

SEQ ID NO: 2230 - DNA, 450 bp, Homo sapiens
  misc_feature (1)...(450): n = A,T,C or G
gtactggcttttgaaaagacccnacgaaagctcgcgngnnnttttgtgcgaagcggcctacggtttttagaagacaacagaagggtggtaaaatcactgaggctttaccaaaaggttatggggacaatgcacctaaaaaaatcagcagtttacaaatggataacttgtaacaagggaaaagatgacgttaaagatgaaggctgcagcagcaggacatccacatcaatttgcaaggaaagaaattaatcctctttgtgccctaactgaagagtcagccaggtgtggtggctcatgcctgtaataccagcactctgggaggtcaaggcaagtggatcacttgaggtccagagtttgagaccagcttggccaacctggtgaaatccattctctactaaaaaaatacaaaaattatccattcatggtggcgcacgcctatatgtccatctactt

SEQ ID NO: 2231 - DNA, 275 bp, Homo sapiens
tttatcaaagtcccacgttcccaggaggagcctgggaaggggtccttttggcgaatagaccctgcctctgaagccaagctcgtggaacaggcattccggaaacggaggcagaggggtgtctcctgcttccgcacccccttcgggcctctgtcctcaaggtaaagttctctgagcgcccgtcctccagctgttaggaaagctgagctgccctggagtttagagatacgtggcgcagtcagccctccggatctgtgggctcaggctcagtgtacggg

SEQ ID NO: 2232 - DNA, 400 bp, Homo sapiens
cgttgctgtcgattttaacaagctctttgctagagagactgcagtgacagatggttgggagtttgcccctaaagctgtgacaccaatcttctaatgagcatatttgttctgggtcgccctgccagattctttctctatttcagaaagggacaacagaataagtgacttcaaaagaagaccatgaggaagagatggatgaagatatataagacttagatcactatgagatgaaagaagagcctattattgagaacaagttggaggatgaaggaactgaataagaaaattgggcaatattatagaaaattaggaagactgaaaggttgaccctgatagtcctttgcacagtgatctttatatcttaacaagaagcgataggagacattcttgttatctttca

SEQ ID NO: 2233 - DNA, 337 bp, Homo sapiens
gatgcccataagatatgggaagctatgttatcaagccatattagatatcaagcattaatatggaaataaaccagcctgtttggtgggctcttcacatggacgcgcatgaaatttggtgccgtgactaggatcgggggacctcccttgggagatcaatcccctgtcctcctgctctttgctccgtgagaaacatgcacctatggcctcatgttctcaaaccgaccaaaccaagaaacatctcaccaattttaaatccgcctggcttgtgaggccttttgaccccaattcaagtcttttgataccctgtgaattgcacccatactgcccagatggctag

SEQ ID NO: 2234 - DNA, 341 bp, Homo sapiens
agacacactgaagcattgcatttgaatcataattatgaaccatttaaaaattggggatttattttttaattatgaaaaattctgttgtaatagtaccacatccaatttatatgttattagctgtttgttacccactatttcattatattggaatgagggcaaataatcctgtaggcaagcacgatattttaaaagttaggaattctgacacatctcaacttttaaatctaatagattgatatgctgctgaaagaatatttactctctggagacatatctgaagctgaacattgccttaaggaactggaagtacctcattttcaccatgagcttgtatatga

SEQ ID NO: 2235 - DNA, 144 bp, Homo sapiens
  misc_feature (1)...(144): n = A,T,C or G
tgcgtgtggaagactacgaaccttacccggatgatggcatggggtatggcgactacccgaagctccctgaccgctcacagcatgagagagatccatggtatagctgggaccacccgggcctgaggttgaactggggtgaacccn

SEQ ID NO: 2236 - DNA, 393 bp, Homo sapiens
ggcacgagggagctggatgatgacatggacgggacggtctcggtgactgagctgcagactcacccggagctggacacagatggggatggggcgttgtcagaagcggaagctcaggcactgcccaccgaccttccagcaccttctgcccctgacttgacggagcccaaggaggagcagccgccagtgccctcgtcgcccacagaggaggaggaggaggaggaggaggaggaggaggaagaagaggctgaagaagaggaggaggaggaggattccgaggtgcagggggagcatcccaaggaggccccaccgtcactgtcacccccgcagccgggcagccctgctgaggaagacaaaatgccgccctacgacgagcagacgccggccttcatcgat

SEQ ID NO: 2237 - DNA, 312 bp, Homo sapiens
cattatcactatagaaaaccacccaatcacaaaaattaacaataagagaggaagtaagtaatgaaggatatacaaaacaactaaaaaacaatcagtaaaataacaagagtatgccctcatctatcaataataatcttgaatgtaaacagattacattccccatttaaaagataaagactgactgaatggataaaagacatgacccaactatatgctgcctagaagaaactcacctcacatgtaaagacacacatagactgaaaataaaggaatggaaaaatatattccacccaaatggaaaccaaaagtaag

SEQ ID NO: 2238 - DNA, 391 bp, Homo sapiens
gttgctgtcgcttgtggattgtaagtggctgacgctgagtgaggttatgaagctgctgaagagctttggcgaggacgagatcgagatgaaagtcgtgagcctcctggactccacatcatccatgcataataagagtgccacatactccgtgggaatgcagaaaacgtactccatgatctgcttagccattgatgatgacgacaaaactgataaaaccaagaaaatctccaagaagctttccttcctgagttggggcaccaacaagaacagacagaagtcagccagcaccttgtgcctcccatcggtcggggctgcacggcctcaggtcaagaagaagctgccctcccctttcagccttctcaactcagacagttcttggtactaatgtgag

SEQ ID NO: 2239 - DNA, 382 bp, Homo sapiens
cgttgctgtcggcggacgctcccgcggagcggaaacctcattgtggtggagagcgtgctcatggcagtggccttcctggccatgctgctggtgctgggtttgtgcggagccgcttaccggcccacggaggagatcgatctgcgcagcgtgggctggggcaacatcttccagctgcccttcaagcacgtgcgtgactaccgcctgcgccacctcgtgcctttctttatctacagcggcttcgaggtgctctttgcctgcactggtatcgccttgggctatggcgtgtgctcgggggggctggagcggttgccttacctcctcgtggcttacagcctggacgcctcagccgcctcactcctgggcctgctggccctggggctcg

SEQ ID NO: 2240 - DNA, 370 bp, Homo sapiens
ggattagaaacagctcaatacacccacaccagaagacctaggataaattctgggaagcatgcaacctcccaagataaaccaagaagatattaaagccctgaaaagatgaataatgagctccaatattgaatcagtcattataaacctaccaaccagagaaagccctggaccagacagattcacagctaaattataccagatgtataaagaagagctgatagaaatcctactgaacatattccaaaaaatcaaggaggaataattcctccataactcattctatgagacagcatcattcagaaacacggtgataaaaggaatctttaggccaaaatcttggaggaacatagatgcaaaaatcctcaaccag

SEQ ID NO: 2241 - DNA, 400 bp, Homo sapiens
  misc_feature (1)...(400): n = A,T,C or G
ggcacgaggagaagctgacgggcatgtggtggaaacagctggtggccggcgcagtggcaggtgccgtgtcacggacaggcacggcccctctggaccgcctcaaggtcttcatgcaggtccatgcctcaaagaccaaccggctgaacatccttggggggcttcgaagcatggtccttgagggaggcatccgctccctgtggcgcggcaatggtattaatgtactcaagattgcccccgagtcagctatcaagttcatggcctatgaacagatcaagagggccatcctggggcagcaggagacactgcatgtgcaggagcgcttcgtggctggctccctggctggtgccacagcccaaaccatcatttaccctatggaggtgctgaagacgcagctgacctn

SEQ ID NO: 2242 - DNA, 368 bp, Homo sapiens
ggaagtagaacattctgaagggcatgtcacacgttcttcaagctcactctgccagccactggagaatggacgtaatgagccaaggatggcaccaggaagtcacgggggcagtgtttgctgctgtccaggcaatcacagtattggtgtcgtgtctcagcaggctgggtgttgggggcctggattcacaacatacatttgaacatattgtcacccgtgcttgctgatagagacatctctatggagtggaggtggcgaatgttgcgtcgaagtctttgcctttttattatttatattctcttgttggggggactactccttatattttcttctctcttcgctgttacggagggtgacatcttatttttttt

SEQ ID NO: 2243 - DNA, 385 bp, Homo sapiens
ggcacgagggacctcctaccgttacttttttattcactcaagaaatgatttcttgagttcccggcctttgttagagagatgaacgaggcacggtccgtgtccagctaaaggacagtaggactggaagagcgttgttttccaaggtacaggatgccgcgcctcctaggagccgaagggacgggaggccgcgtagaggaggggaccgtccccgagcctcgccgagcctgcggtgtagacacctctggtgtctagtggttgaggatctgttgaccgggcatggtgggtagaaggaacgctccgagcagaagaaaagtggctgtcgtgaagacatctgcgtgtgcggcgtgcgtgggtgcctggagatgaagctggaaagagctgctgc

SEQ ID NO: 2244 - DNA, 344 bp, Homo sapiens
  misc_feature (1)...(344): n = A,T,C or G
gagaacattctgaagggcatgtcacacgttcttcaagctcactctgccagccactggagaatggacgtaatggagccaaggatggcaccaggaagtcacgggggcagtgtttgctgctgtccaggcaatcacagtattggtgtcgtgtctcagcaggctgggggttggggccctggattcaaagcatccatctgaacatattgtcacccgtgcatcctgagagagacagcttcatggagtggaggtgtgtggcctggaggccccacgtangccaccaggcatgttttccacgaaaaccgaaacttctgacgggattactaacattgggagatttccgtttcttg

SEQ ID NO: 2245 - DNA, 396 bp, Homo sapiens
ggcacgaggagaagctgacgggcatgtggtggaaacagctggtggccggcgcaatggcaggtgccgtgtcacggacaggcacggcccctctggaccgcctcaaggacttcatgcaggtccatgcctcaaagaccaaccggctgaacatccttggggggcttcgaagcatggtccttgagggaggcatccgctccctgtggcgcggcaatggtattaatgtactcaagattgcccccgagtcagctatcaagttcatggcctatgaacagatcaagagggccatcctggggcagcaggagacactgcatgtgcatgagcgcttcgtggctggctccctggctggtgccacagcccaaaccatcatttaccctatggaggtgctgaagacgcggctga

SEQ ID NO: 2246 - DNA, 314 bp, Homo sapiens
gaccgtttatgtaactttatattgggacaatgaatcctttgaggccacttgcctaccgagccggttgatcgctgaggagccactatttagactctattaaactttcttgttgcccgcggaaccctctaaatccccttgtaaatttaactgttagtccaaagaggaacagctctttggacactaggaaaaaaccttgccgagagagtccccaccttaaaggggcgcaaaaaaaacggttggggggtaattttgggagacctccctgttttttaaaccactatttagtgggaaaaaaccccttttaaaaggcgggg

SEQ ID NO: 2247 - DNA, 364 bp, Homo sapiens
actgaattacaataatgacacaacctatctaaacctgtgggatacagataacgcggggctaagaggaaagttcacagccctaaatgcctacatcatagtctgaaagagcacaaacagacaatcccaagtcacacttcacggaactagagaaacaagaacaagccatacccaaacccggacccagcagaagaaaagaaataacccagatcagagaagaactaaatgaaaatgatgcaaaatacttacctaagataaatgagacacaactggttctttgaaaagataaataaaattataaactgttagcaagactaaccacgaaaagaagaaaaaaaggccaataaccttgctgagtaatgaaccc

SEQ ID NO: 2248 - DNA, 311 bp, Homo sapiens
caagcttaaccataagtacaataagccccagcatttgcatggtagtcaagctcattcaagcaaaactctctccagtagggaatttcccctgcagagaccatgtgcatttttatttcacttgtcctcagactgactctttgttcattataatagtaaaaaacacatccctgggtggagatttagagctaataagacatgcgatgtatgaacaagcatgtaaagctactgcacatgtgcagccaaagaaccacccataacatgcttaccagcaacactctttcccacccccttaagaataaccacggaaggct

SEQ ID NO: 2249 - DNA, 123 bp, Homo sapiens
actccccgccctaagatctctgtgtgtgtcctgggggaccagcagcactgtgacgaggctaaggacgtggatatcccccacatggacatcgaggcgctgaaaaaactcatcaagaataaaaaa

SEQ ID NO: 2250 - DNA, 127 bp, Homo sapiens
tagaatctttggaggtctggacatgttagctgaaaaactcaaatctcacacatctaaacttaagtggaaataaactgaaagatatcagcaccttggaacctttgaaaaagttagaatgtctgaaaag

SEQ ID NO: 2251 - DNA, 348 bp, Homo sapiens
ggctcactgcaacctccacctcctgggttcaagcgattctcctgcctcaacctcctgagtagctgggactaactacaggtgcgtgccaccatgcccagctaatttttctatttttagtagagacggttttcaccatgttggccaggaagcgccttaattgtgtgaatcttgatgacatgcgagatcagcttccagagcatggctctatatgctgacgcccctgaaaacagatccctgttactttaggccaagatgtggggcgatatcatgtattctggaacctggaccacaagagcccccacgcaggcccctaagatggtagattcttcgacgaagattcctaccctc

SEQ ID NO: 2252 - DNA, 359 bp, Homo sapiens
actgaattacaataatgacacaacctatcaaaacctctgggatacagctaaggcggtgctaagaggaaagttcacagccctaaatgcctacatcaaagtctgaaagagcaccaatcagacaatcccaagtcacacttcaaggaactagagaaacaagaacaagccaaacccaaacccatacccagcagaagaaaagaaataaccaagatcagagaagaactaaatgaaaatgaaacataataaatacaaaagataaatgaaacaaaactggttctttgaaaagataaataaaatttatagactgttagcaagactaaccaagaaaagaagagagaaagtccaaataacctcactgagtg

SEQ ID NO: 2253 - DNA, 154 bp, Homo sapiens
  misc_feature (1)...(154): n = A,T,C or G
cananggcttgttttggaccacagaccacggtatcctgatatgataaaaagggcggaggatgcatacatcctcacttgtaacgtgacattagagtatgagaaaacagaagtgaattctgtctttttttaccagagggcacaacattgagaaaaa

SEQ ID NO: 2254 - DNA, 401 bp, Homo sapiens
ggcacgagccctcttcccatgaggtggtagcctggattcgacggatacttcgggtggagaagacagggcacagtggtactctggatcccaaggtgactggttgtttaatcgtgtgcatagaacgagccactcgcttggtgaagtcacaacagagtgcaggcaaagagtatgtggggattgtccggctgcacaatgctattgaaggggggacccagctttctagggccctagaaactctgacaggtgccttattccagcgacccccacttattgctgcggtaaagaggcagctccgagtgaggaccatctacgagagcaaaatgattgaatacgatcctgaaagaagattaagaatcttttgggtgagttgtgaggctggcacctacattcggacattatgt

SEQ ID NO: 2255 - DNA, 124 bp, Homo sapiens
gcagtggacgtggatttggtgatggctataatggttatggaggaggacctggaggtggcaattttggaggtagccccggttatggaggaggaagaggaggatatggtgctggaggacctggata

SEQ ID NO: 2256 - DNA, 124 bp, Homo sapiens
ggtttttcagctcacttcaagggtacctgaagcgaattggcaccaaagcagcagctgtattggcgcagttctagcttcaccttcacgatgtttcccttggtcaaaagcgcactaaatcgtctct

SEQ ID NO: 2257 - DNA, 147 bp, Homo sapiens
ggagaatcgaggcactcgctggcgtacccatgtatcgaaatgagttcacggcctggtaccggcggatgtcggtggtctacgggatcggcacctgggctgtgttgggctcactgctttactatagccggacaatggcgaagtcgtcag

SEQ ID NO: 2258 - DNA, 341 bp, Homo sapiens
gttctgtcgcccaggctgaagtgcagtggcatgatcccggctcactgtaggctccgtctccccagttcacaccattctcctgcctcagcctaccgagtatgcacccgccagcatgcctgcgtggccgagttcttctcattcggcatcaacagcattttatatcagcgtggcatatattcatctgaaacctttactcgagtgccgaaatacggactcaccttgcttgaactactgatcttgagctcatatatacctaactaagggtcgcgcccttcgaaatatgatttactatcttgcctagcattctggagctctctagcacattctggtttctactatgt

SEQ ID NO: 2259 - DNA, 363 bp, Homo sapiens
cgaaccacaatagtgacacatcctatcacaatctttgggacacaccagaggcagtgctaacaggaaagttcatagccctacacgcctacctcaaaagggctgaaagagcatctacagacaatctaaggtcacacctcaagcggctagagaaacaagaacaaccaaatcctcacccagctgaagaaaggaaatagcctggatccgagcagaactagatgaaattcagacaaacaaactccacttgcgctccaaaaatacgtaagacgaagagctggttctttgaaaagataaataaaattgatagaccattagcaagattaaccaggaaaagaagagtgaaaattcttataagctcaatgagaa

SEQ ID NO: 2260 - DNA, 348 bp, Homo sapiens
cggcctactgctgcaagaagacaacagaaggctactgctgcaagaagacaacagaaggctgctgctgcaagacgacaacagaaggctactgctgcaagaagaccacagaaggctacggctgcaagaagacaacagaagggtactgctgcgaagaccacagaagggtactcctgccagaagacgacagaagggggagcgccgctcctgctgcaccgtgcttgctacgagtttcatgctcgtgctaaactagcgccgtcgtcttctttcttcagtcgtcatgatgattatctaccgccacctcatcacccacgatgagatgttctacgacatctacaagatgcaggagat

SEQ ID NO: 2261 - DNA, 393 bp, Homo sapiens
cgttgctgtcggtgcatcctctcccagtggatgcgatcacctgtgcctcccctccccttttattcacatcgcgtattttggcattttccagataatgacaaggcacagacagggtgggggatggactgaagcaccatgtcttgtttactggctcctaatttattttcattctttgttgactaaccacacatgtgccctcggaggttacatgtgtggtgaccactctacattctggatgttttattaaacattgaacgcgcctacgaggagcgaacttaaaataatacatccactggctgataaagggaagctgcaataccaaggcgaagattgataatgcacacgcttttcttttttgtaccgtacatattttcacaccatcttagatataat

SEQ ID NO: 2262 - DNA, 408 bp, Homo sapiens
ggcacgaggtgtgcttaggtgcccgagctactgagggtctaagtccgggcagccgaagagtgtggtaggtaacggtcctcagcgcaagggtcatttcgtcgctgggaagggacggccctcgcccgcggtgatggtggttagcaagatgaacaaagatgcgcagatgagagcagcgattaaccaaaagttgatagaaactggagaaagagaacgcctcaaagagttgctgagagctaaattaattgaatgtggctggaaggatcagttgaaggcacactgtaaagaggtaattaaagaaaaaggactagaacacgttactgttgatgacttggtggctgaaatcactccaaaaggcagagccctggtacctgacagtgtaaagaaggagctcctacaaagaataagaac

SEQ ID NO: 2263 - DNA, 357 bp, Homo sapiens
  misc_feature (1)...(357): n = A,T,C or G
atgacctcaacggtgccgtgatgatacaataccacctatggagaaagctctagggaaaatggacattcagatagctcttccttctggatggtacagaagagtagctccatggtttggattagctgcaaaacactttattgatagatgaagattactgaggaaatgttggtgctgtactgtttaattttggcaaaaaaaagtttaaagtcagaaaaagtgatcgtactgcacagctcatttgtgaatgaatttttaatccagaaatagaagttcaagctttggatgatgctgaaaggcattcagaagagttaggttctattagaaagtattaaaatttatgctaagaatagaaaatgn

SEQ ID NO: 2264 - DNA, 399 bp, Homo sapiens
atcccatcgattcgaattccgttgctgtcgactgggaaactgcacctcgtcacatgatgcgtctagatattcgttctttgctgcaagatgctgctattgaagaggtagagatggaagattttgatgcaaatatcgaagaacagaaagaagaaaagaaagatgcagaggaagaggaaagcgaactgggttacattccgaaaagcaaatgggagatggacacatctgaggcaaagctagacaagttggatggcttgaggactggtactaaaaggaaacgtgactgggaggccattgccagcagaatggaggattatcttcagctccccgatgattatgatactcgtgcttctgagcctgggaagaagagggtcagatgggcagacctggaagagaagaagg

SEQ ID NO: 2265 - DNA, 322 bp, Homo sapiens
gcctcagcctccctagtagctgggatgacaggcgcctgccatcatgcctgactaatttttgtatttttagtagagacggcgtttcaccatgttggccaggctggtctcaaactcctgacctcaggtgatccgcctacctcagcctcccaaagtgctgggattacaggcgtgatccaccacacctggcccttgcaatcttctactttaaggtttgcagagataaaccaataaatccacaccgtacatctgcaatatgaattcaagaaaggagatagtaccttcaatacttagaaatagtcttccacaaaaaatactttatttc

SEQ ID NO: 2266 - DNA, 329 bp, Homo sapiens
attgatagaccattagcaagattatcgagaaaagaatacagaaaatccaaataagctcaattagaaacaaaacaggagatactacaactgacaccactgaaatataaaagatcatttcaaggctactatgaacacctttacatgcataaactataaaacctaaaggagatggataaattcctggaaaaataaccaccctcctagcttaaatcaggaagaattaaatacccttgacagaccaattaccaaccgagaggatgaaatggttaccaaaaaaaattaccaatggaaaaagccaggaccacaccgattcacaggtgaaatttatg

SEQ ID NO: 2267 - DNA, 230 bp, Homo sapiens
gtagtaccatgcacattattgaggaatgttctaaaggtatatctctcggggtatttctctacttacctgtgataatgcttttgtcttaatagggtggttctcttccctaagcgctagccaaattcatgaattatgtgaagaattgctttcggatgactgaccaagaggctattcaagatctctggcagtggaggaagtctctttaagaaaatagtttatacaatttgtta

SEQ ID NO: 2268 - DNA, 323 bp, Homo sapiens
gactggaaagcgaaggctctcctgaaactcttacaaacttaaggaaaggatacctgtttatgtataatcttgtgcaattcttgggattctcctggatctttgtcaacctgactgtgcgattctgtatcttgggaaaagagtccttttatgacacattccatactgtggctgacatgatgtatttctgccagatgctggcagttgtggaaactatcaatgcagcaattggagtcactacgtcaccggtgctgccttctctgatccagcttcttggaagaaattttattttgtttatcatctttggcaccatggaagaaatgcag

SEQ ID NO: 2269 - DNA, 317 bp, Homo sapiens
  misc_feature (1)...(317): n = A,T,C or G
ggggccctgtgtctggaggctgcatgaatcccgcccgtgcttttggacctgcggtggtggccaaccactggaacttccactggatctactggctgggcccactcctggctggcctgcttgttggactgctcattaggtgcttcattggagatgggaagacccgcctcatcctgaagcctcggtgaagcagagctcgtgggattcctgctgctccaggtgtcctcagctcacctgtcccagactcaggacaggggagttcctgcatttcctgccagggcagaggcccagaggagcgaccccctgcttccactgcttgn

SEQ ID NO: 2270 - DNA, 316 bp, Homo sapiens
gcattgggtcaaaaacaaaatgaagatggaattaaaaaaattatttgaactgaatgacagtaaggacaataatgacctctgggatacagcaaaggcagtgctaacaggaaagttcatagacttaaattcctacatcaaaaagtctgaaagattgcaaatagacaatctaagatcacacctcaaagaactagagaaacaaaaacaaaccaaacccaaacccagcagaagaaaggaagtaaccacgatcaagcagaactaaatgaaattgaaacaacaacaaaaacaatacaaaagataaatgaaacaaaaagctagt

SEQ ID NO: 2271 - DNA, 322 bp, Homo sapiens
gcattgggtcaaaaacaaaatgaagatggaattaaaaaaattatttgaactgaatgacagtaaggacaataatgacctctgggatacagcaaaggcagtgctaacaggaaagttcatagacttaaattcctacatcaaaaagtctgaaagattgcaaatagacaatctaagatcacacctcaaagaactagagaaacaaaaacaaaccaaacccaaacccagcagaagaaaggaagtaaccacgatcaagcagaactaaatgaaattgaaacaacaacaaaaacaatacaaaagataaatgaaacaaaaagctagttctttg

SEQ ID NO: 2272 - DNA, 326 bp, Homo sapiens
ggcgtcgtagtctcctgcagcgtctggggtttccgttgcagtcctcggaaccaggacctcggcgtggcctatcgagttatggcgacgaaggccgtgtgcgtgctgaagggcgacggcccagtgcagggcatcatcaatttcgagcagaaggaaagtaatggaccagtgaaggtgtggccgatgtgtctattgaagattctgtgatctcactctcaggagaccattgcatcattggccgcacactggtggtccatgaaaaagcagatgacttgggcaaaggtggaaatgaagaaagtacaaagacaggaaacgctggaagtcgcttg

SEQ ID NO: 2273 - DNA, 130 bp, Homo sapiens
aacataaccattcttaatttaactgtttatattatcctaactactaccgcattcctactactcaacttaaactccagcaccacgaccctactactatctcgcacctgaaacaagctaacatgactaacac

SEQ ID NO: 2274 - DNA, 406 bp, Homo sapiens
  misc_feature (1)...(406): n = A,T,C or G
cgttgctgtcgccggggcggaggagaggacctccttggttcctttggttctgtcagtgagccccttccttggccatgaagctcgtgaggaagaacatcgagaaggacaatgcgggccaggtgaccctggtccccgaggagcctgaggacatgtggcacacttacaacctcgtgcaggtgggcgacagcctgcgcgcctccaccatccgcaaggtacagacagagtcctccacgggcagcgtgggcagcaaccgggtccgcactaccctcactctctgcgtggaggccatcgacttcgactctcaagcctgccagctgcgggttaaggggaccaacatccaagagaatgagtatgtcaagatgggggcttaccacaccatcgagctggagcccaaccgccagttcan

SEQ ID NO: 2275 - DNA, 245 bp, Homo sapiens
tgatttctgtggatcccagcttggttccaggaattttgtgtgattggcttaaatccagttttcaatcttcgacagctgggctggaacgtgaactcagtagctgaacctgtctgacccggtcacgttcttggatcctcagaactctttgctcttgtcggggggggggtgagctcccatgtctacgagcacagggggtctttggctatccggcctgataggtggtatcgttacatcctcttgtgctg

SEQ ID NO: 2276 - DNA, 375 bp, Homo sapiens
  misc_feature (1)...(375): n = A,T,C or G
tgagccaggcatggtggtgcatgcctataatcccagctacttgggaggctgaggcaggagaactgcttgaacccgggaggtggaggttgcagtgagtcaagatcgcgctattgcactccagctctgggcaacagagcaagactccatctcggggaaaaaagcaaaacaaaacaaaacaaaaatcaaaaacataaataaagtgtgacagggtgtcctactatgcagtagagtaacacatcagaaaaaacaaaataggctgggcacattggctcatgcctgcaatcctagccctttgggtggctgagtgggggcgggtcccttgagctgaggagttggagaccagcctgtgcaccaaaacacaaccttgtctctacn

SEQ ID NO: 2277 - DNA, 394 bp, Homo sapiens
cgttgctgtcggtttcaccatgttggccaggctggtctcgagctccgacgtgctggtggtggtggtttccatgctgagcaccgccccccagcccatccgcaacatcgtgttccagtcagctgtccccaaggttatgaaggtgaagctgcagccaccctcgggcacggagctgccagcttttaaccccatcgtccacccctcagcaatcacccaggtcctgctgcttgccaacccccagaaggagaaggttcgcctccgctacaagctcaccttcaccatgggtgaccagacctacaacgagatgggggatgtggaccagttccccccacctgaaacctggggtagcctctataacagaggggctggggagaggaaggggcagagggaccggtca

SEQ ID NO: 2278 - DNA, 149 bp, Homo sapiens
gaggttctgggaagatggcgaaggtctcagagctttacgatgtcacttgggaagaaatgagagataaaatgagaaaatggagagaagaaaacttcagaaatagtgagcaaattgtggaagttggtgaagaattaattaatggagatgcg

SEQ ID NO: 2279 - DNA, 218 bp, Homo sapiens
  misc_feature (1)...(218): n = A,T,C or G
aacactgaactgacaattaacagcccaatatctacaatcaaccaacaagtcattattaccctcactgtcaacccaacacaggcatgctcataaggaaaggttaaaaaaagtaaaaggaactcggcaaatcttaccccgcctgtttaccanangagatataaaaaaatttaaanggggggggcgttttttttttttttccgacctgtgaaaatattttt

SEQ ID NO: 2280 - DNA, 141 bp, Homo sapiens
gaactgacaattaacagcccaatatctacaatcaaccaacaagtcattattaccctcactgtcaacccaacacaggcatgctcataaggaaaggttaaaaaaagtaaaaggaactcggcaaatcttaccccgcctggttac

SEQ ID NO: 2281 - DNA, 325 bp, Homo sapiens
atgttagctgagtgatggccaagttttttctctggacagtaatgtaaatgtcttactggaaatgacaagtttttgcttgatttttttttttaaacaaaaaatgaaatataacaagacaaacttatgatagatcaggggtgttgttatgtttttttaatttaaaaatgcaaccctgccccctccccagcaaagtcacagctccatttcagtaaaggttggagtcaatatgctctgactgacaggcaaccctgtagtcatggagaaaggtttttaaagatctagtccaatctttttctagagaaaaagataatctgaaactcacaaa

SEQ ID NO: 2282 - DNA, 359 bp, Homo sapiens
gtgacacaacctatggaaacctctgggatacagcaaaattgatgctaagaagaaagttcatggcattaaatgcctacatcaaagagtctgaaagaacacaaatagacgatttaaggtctcacttcaagggactagagaatcaagaacaaacaaaacccaaacccagcagaagaaataagatcagagcagaactaaatgaaattaaaacaaaacaaatacataggacaaatgaaacaaaaagctcgttattagaaaagataaacaaaattaatagactattatcaagattaaccaagaaaagaagagagaagatcgcaatgggctcaattagaaacaaaacaggagatatcacaaccaag

SEQ ID NO: 2283 - DNA, 376 bp, Homo sapiens
  misc_feature (1)...(376): n = A,T,C or G
cgttgctgtcgctgccagggcgctccgacgtgctggtggtggtggtttccatgctgagcaccgccccccagcccatccgcaacatcgtgttccagtcagctgtccccaaggttatgaaggtgaagctgcagccaccctcgggcacggagctgccagcttttaaccccatcgtccacccctcagcaatcacccaggtcctgctgcttgccaacccccagaaggagaaggttcgcctccgctacaagctcaccttcaccatgggtgaccagacctacaacgagatgggggatgtggaccagttccccccacctgaaacctggggtagcctctaaaacagaggggctggggagaggaaggggcanagggaaccggcact

SEQ ID NO: 2284 - DNA, 150 bp, Homo sapiens
gaactgacaattaacagcccaatatctacaatcaaccaacaagtcattattaccctcactgtcaacccaacacaggcatgctcataaggaaaggttaaaaaaagtaaaaggaactcggcaaatcttaccccgcctggttaccaaaaaaaa

SEQ ID NO: 2285 - DNA, 396 bp, Homo sapiens
cgttgctgtcggtccggggctatggctgtgactctggacaaagacgcttattatcggcgagtgaagagactgtacagcaattggcgggtgaggaagatcctgtaatttttcctagggagcccccttagccatcccataataaccctgtttctcggcgcccttttttctctttcggtcaggaattcccgggttctgtgcctcacccttttcgttgctcccgaatcattcaccggaggcggccacgaacgctgccccttaacagggaatcccccgcattcaccctgtcctgcggccatcaccatcttccccgcgtgccagccttggtcatgcatagcagcacctctcgcagtctcttcccgccctagaagaggcaacatccttccctcctactccgtg

SEQ ID NO: 2286 - DNA, 353 bp, Homo sapiens
gagagttcctccttgctctggcccctactctttctggtgttagatcgagctaccctctaaaagcagtttagagtggtaaaaaaaaaaaaaaaaccccccaaccgctcgaacccccaaaggggagaaaatttttttgggacatcctcctgcttttcccgatactgaacgttggctccctaaagcccttcgggaagcttttttttcctaaaaggaaaaaatcaccccccgggaaaatcgggctgattacaggacctggcctgggaatgggaaaactgccggcctataaatttgctaaactaaaaagcaagcgggttttttggaataaaaataaccatggactggaggaaacaccg

SEQ ID NO: 2287 - DNA, 131 bp, Homo sapiens
tagtagactacacaacagcgaaggaatttgctgattcccttggaattccgtttttggaaaccagtgctaagaatgcaacgaatgtagaacagtctttcatgacgatggcagctgagattaaaaagcgaatg

SEQ ID NO: 2288 - DNA, 328 bp, Homo sapiens
ggaatccccggcggcagtggggctgttgctgttgctgtggctgtcgctgcccgtcaggctgccttcttttgtcgtttcccagcgctgcgcaggacttctcctggcggcgctgcggatccagggggtcggctgccaggtacaggggttgaggctgggcaaacgccgcgaaactatcgctcttccccgtcccgcttccgcgcctgtccaccctgggtaacggaaccagcatcgcggtagggacatcctcgctaggcccggccggaccattcctcagggtgggccctttccgaagccgggaccgctcctgcttgtcggcatcgctcccccg

SEQ ID NO: 2289 - DNA, 385 bp, Homo sapiens
cgttgctgtcggatgaaattggagctctggataatgcagaattggaaggttctattcaagtggacagcaatcgcttacaggaagctttgaatgactactataaagagaacgcagacaaccgtgtacaactgaatacccttgaacccttggaggatcacgacctgcctatgaatgatctcgacgactctgagaaggactacttgaggactgtagaccttgagcaaacatatgagacgtgggtaacgctgtcatggacgcggttaaacagcacaagccataactgttcaccactattaccaaaaacctaggggtcgggacgggaattgaaatccgcgaaggctccctagtcttccatagccttaatcaatacaggccgaacagagga

SEQ ID NO: 2290 - DNA, 334 bp, Homo sapiens
  misc_feature (1)...(334): n = A,T,C or G
atatcaaaacctccaggataccgcaaaggcagtgctaaaaggaaagttcatagcgttaaatgcctacatccccaagtctgaaagagcacaaatagacaatctaaggtcacacctcaaggaactagagaaacaagaacaaaccaaaccccaacccaaacccagcagaagaaaagagataaccaacatgagaccagaactaaatgaaattgaaacaacaacaacaacaaaaaccaacaaaaaataaataaaacagaaagctggttctttgaaaagataaataagattgatagaacattagcaagattaaccaagaaaagaagagagaagatccnaa

SEQ ID NO: 2291 - DNA, 426 bp, Homo sapiens
cgttggtgtcggcattagtcactttgaaatgtaacaaatggtactacaaccaattccaagttttgatttttaacaccatggcaccttttgcacataacatgctttagattatatattccgcactcaaggagtaaccaggtcgtccaagcaaaaacaaatgggaaaatgtcttaaaaaatcctgggtggacttttgaaaagcttttttttttttttttttttgaaaagggattttttttttttcccccgggtgggggggaaaaacaaaaattgggtttaatggcccctccgttttttggggtaaaaaaattggcgggctcacccccccgaggaggtggaaataagggggcccctttcccacccaaagttatttttggtttttttaaaaaaaaggggggttcaccattctggccaggctgggtttaaa

SEQ ID NO: 2292 - DNA, 391 bp, Homo sapiens
cgttgctgtcgtttttttttaaatatgggtattggcgttttttcttttttactctttccttcttaactcaagacttgtagtgttgtaaacctgcctcacaaaatacatggaaataacttttctttaaaaaaaaaaaaaaaacagccttaacccattttttgggggcccactttttgggcaaggatggacaccaatttatttcccccttggggcccccaaaaacttatttaaatacccttttttaacccacccttctctttattatagggacatgcccttaaatggacaaaaaaggtttaccctttggaataaaaatgcagagcaggcaaaaccattacacctgtggcgaaaagttaaaagttagggaaaaaccggggcagaggaaaagggg

SEQ ID NO: 2293 - DNA, 331 bp, Homo sapiens
  misc_feature (1)...(331): n = A,T,C or G
ggcgacaaacctaccgagcctggtgatagctggttgtccaagatagaatcttagttcaactttaaatttgcccacagaaccctctaaatccccttgtaaatttaactgttagtccaaagaggaacagctctttggacactaggaaaaaaccttgcagagagagtanaaaaaaaaaaaaaaaaaaaaaaaaaaagggggcctttttttccgtaaacccaacatggaaaaaaaccttggggggtttgggccaccccccccttaaagggcggggaaaaaagggttttttttggaaaattggggaggttttggtttttttggaaccctttaaagc

SEQ ID NO: 2294 - DNA, 235 bp, Homo sapiens
cagtagacactgaggcctcacctcagactgggcaaggagcagggagcatacctgggccccagcatcagcatcagcctgctcctccccacacagcactcgggccaggccctctcccctgtccttcttaaactccgcctgggaagacagagaaacatggagagcaagagatgaaattactgctctgccctaaactgcacccagagtctctgattacagtcatactcttaccccgtcc

SEQ ID NO: 2295 - DNA, 414 bp, Homo sapiens
cgttgctgtcggggaaataagaagaatgaaagcctctctttctgtccgcagatcctgacttttccaaagtgccttaaaagaaatcagacaaatgccctgagtggtaacttctgtgttattttactcttaaaaccaaactctaccttttcttgttttttttttttttttttggggcccctccccttccgggcaagggggggggtccttttttaaacccagggaaaaaccggcccccccctttggtggacgaagggctctaagggcccccccgggccccagggcccacccgggccccatttggcccgggtggttgcccggccccggaaaaccccggggccccggttcctttacgggggatttaggggcggggggtccagggaccattccctttcccggggagttataccgcgaaag

SEQ ID NO: 2296 - DNA, 377 bp, Homo sapiens
ttgcaaaggctaaagagttgggtgccactgaatgcatcaaccctcaagactacaagaaacccattcaggaagtgctaaaggaaatgactgatggaggtgtggattttttgtttgaagtcatcggttcggtcgataccattactgccttccctgctatgatgtcattattcttatatgtttcgtacctctctttgggtttctcttgttttcttaatttttcctcttgactctttctttggtctatctccccacctcttttattcctcttttccttttttgtataatactgtctcctatcattcctttctttatcttcaccctctacgtccttttctttggtttaatccttctgactttttcgtttcctcttccgctct

SEQ ID NO: 2297 - DNA, 412 bp, Homo sapiens
ggcacgaggcagagccagcccccgaccccgggccacctgggcccccgggttccgccggcactctcgccaccaccgcgtgggtctgacaagatgtaccaggtcccactaccactggatcgggatgggaccctggtacggctccgcttcaccatggtggccctggtcacggtctgctgtccacttgtcgccttcctcttctgcatcctctggtccctgctcttccacttcaaggagacaacggccacacactgtgggccatccacgaaaatgctttcattgtgttcattgcctcatccctcgggcacatgctcctcacctgcattctctggcggttgaccaagaagcacacagtaagtcaggaggtacggtctatccctagcgggggctccaaggcagcccagaagataattag

SEQ ID NO: 2298 - DNA, 342 bp, Homo sapiens
tacgtctgctagaacacgacagaaggggaaccggatgctggacaggcaccccggcttggcgctgtctctccccctcggctcggagaggcccttcggcctgagggagcctcgccgcccgtccccggcacacgcgcagccccggcctctcggcctctgccggagaaacaggtgaagggggtgcagggtggggccgttggggaggcctggggacccgggggctccgcagcggcagggggcctctgggaccttggggatgttgtgatggacgctgcagtggggccgggagagatgaagagacgcggagggtcgccctgagggaagactcttcgggatgacaggagc

SEQ ID NO: 2299 - DNA, 169 bp, Homo sapiens
cgatggtagtcgccgtgcctaccatggtgaccacgggtgacggggaatcagggttcgattccggagagggagcctgagaaacggccaccacatccaaggaaggcagcaggcgcgcaaattacccactcccgacccggggaggtagtgacaaaaaaaaaaaaaaaaaaaa

SEQ ID NO: 2300 - DNA, 141 bp, Homo sapiens
cacccaccagtgggaccaccagagatgtggatgggatggtttctgtgatgaccagcaaaaacacagtcagagaaagcaggactgaaatacaaagcgtcactttttcaccacagtccgaaggaaggtaaaagaccaacacgg

SEQ ID NO: 2301 - DNA, 318 bp, Homo sapiens
gaagggcgctccgcgagcccgtctctcctcgaatgaaaggaaacaacctccggcgacagagccccgctctcaggcactgctggagaaccgagaccgacttctttctctttaccctcattggcgcttctctcctgcagtccgcctctgggccctgccgcatttcttgagacttaaagtggcattctaaaggcaatttaaaaaatcaatggtcagctcagttgaacagaaaaaagggcctacaagacagcgcaaatggggcttttggtagtcaaatagagacaaagaatgtggacagttactaatatctgaaaaccagaa

SEQ ID NO: 2302 - DNA, 151 bp, Homo sapiens
cgttgctgtcgcttaaagcgggccttcgtgaggatgagtacaagccctgaggctttcctggcgctccgctcccacttcgccagctctcacgctctgatatgcatcagccactggatcctcgggattggagacagacatctgaacaacttta

SEQ ID NO: 2303 - DNA, 298 bp, Homo sapiens
cctcctctctgccttccaacctccagaggacgagacctaaagggtgcctgattggctgcggagggcggggctaagacaaggggcggggctgccgagaccttgggcccgcgtgagggaaaatttgggttcgattaagccgcagaggaaaagaccaggggagtctgggcccatttgggcgtcggggcccgctaggtcagccgtcatcgaatacagaatatgttttcgaggacgctaatatgtagtcatgaccaatttcagttcttctactttctgcgggccttcgcaaaaaaaaaaaaaa

SEQ ID NO: 2304 - DNA, 390 bp, Homo sapiens
cgttgctgtcgcaggcactgtcctccctggagctgctcaacgttctcttcaggacctgcaaacatgagaagctgaccttggacctgacggtgctcctgggtgtgctgcaggggcaacagcagagcctacagcagggggcacactccaccggctccagccgcctgcacgacctctactggcaggccatgaaaaccctgggagtccagcgccccaagttggagaagaaggatgccaaggagatccccagtgccacccagagccccatcagtaagaagcggaagaaaaagggattcttgccagagacgaagaagcgcaagaaacgcaagtcagaggatggcacgccagcggaggatggcacacctgcagccaccggcgggagccagcccccca

SEQ ID NO: 2305 - DNA, 391 bp, Homo sapiens
  misc_feature (1)...(391): n = A,T,C or G
cgttgctgtcgcgcacaccaaggcgcagcatcagcaggcactgtcctccctggagctgctcaacgttctcttcaggacctgcaaacatgagaagctgaccttggacctgacggtgctcctgggtgtgctgcaggggcaacagcagagcctacagcagggggcacactccaccggctccagccgcctgcacgacctctactggcaggccatgaaaaccctgggagtccagcgccccaagttggagaagaaggatgccaaggagatccccagtgccacccagagccccatcagtaagaagcggaagaaaaagggattcttgccagagacgaagaatcgcaagaaacgcangtcataggatggcacgccaacgtaggaatgcacacctgcaacc

SEQ ID NO: 2306 - DNA, 389 bp, Homo sapiens
cgttgctgtcggtggatgtcttgcagtgatgattctgcaaaacctcttttctaaccctgagaaattcttcagtattcgtacgaggtggctcgactgctcaacctcaccgagaggcaggtcaagatctggttccagaaccgcaggatgaaaatgaagaaaatcaacaaagaccgagcaaaagacgagtgatgccatttgggcttatttagaaaaaagggtaagctagagagaaaaagaaagaactgtccgtcccccttccgccttctcccttttctcacccccaccctagcctccaccatccccgcacaaagcggctctaaacctcaggccacatcttttccaaggcaaaccctgttcaggctggctcgtaggcctgccgctttgatggg

SEQ ID NO: 2307 - DNA, 159 bp, Homo sapiens
  misc_feature (1)...(159): n = A,T,C or G
gagtcggactgcgacacagcccatcccctcgaccgctcgcgtcgcatttggcctcctccctaccgctccaagcccagccctcatccatggcatgccccctggatcangccattgggctccttgtggccatctttcacaagtactccggcagggagggtg

SEQ ID NO: 2308 - DNA, 147 bp, Homo sapiens
  misc_feature (1)...(147): n = A,T,C or G
ggtttttcagctcacttcaagggtacctgaagcgaattggcaccaaagcagcagctgtattgccgcagttctagcttcaccttcacgatgtttcccttggtcaaaagcgcactaaatcgtctccaagttcgaagcattcagcaaacn

SEQ ID NO: 2309 - DNA, 148 bp, Homo sapiens
  misc_feature (1)...(148): n = A,T,C or G
tgattatctaccgggacctcatcagccacgatgagatgttctccgacatctacaagatccgggagatcgcggacgggttgtgcctggaggtgtaggggaagatggtcagtaggacagaaggtaacattgatgactcgctcattggtgn

SEQ ID NO: 2310 - DNA, 391 bp, Homo sapiens
  misc_feature (1)...(391): n = A,T,C or G
cacgccattctcctgtctcagcctcctgagtagctgggactacaggcgcccgccaccatgcccagctaatttttttgtatttttagtagagacgggttttcaccgtgttagccaggatggtctcgatctcctgacctcgtgatctgcccgccttggcctcccaaagtgctgggattacaggcatgagccaccgcgcctggcccattttcttcctcttttgaggtaatggatttgtttggagatggcatgttagtagacgactgaatatggaaaggatatcgagttatctattttggtaattntatttttggtttttatcatctagatttttatcatggattagtctgaaatttaaagttctggccagtcggttttcttttatcttggaagg

SEQ ID NO: 2311 - DNA, 166 bp, Homo sapiens
  misc_feature (1)...(166): n = A,T,C or G
aaaaggtctnnatnaattgcaaagatgtctgacacagtctggcattgctggaggatacaaaccttttaacctggagacttgccggcttatggtttcaatgctggatagagatatgtctggcacaagggtttcaatgaatttaaagaactctgggctgtactgaatg

SEQ ID NO: 2312 - DNA, 149 bp, Homo sapiens
atgacccaccaatcacatgcctatcatatagtaaaacccagcccatgacccctaacaggggccctctcagccctcctaatgacctccggcctagccatgtgatttcacttccactccataacgctcctcatactatgcctactaaccaa

SEQ ID NO: 2313 - DNA, 296 bp, Homo sapiens
gcttcggctgcaagaagacgacggaaggggggtgttttgcgggtagcgcggcgtgataagccatgagcaccaaaggctctggcgacaccctgtacgaggcggtgcgggaagtgctgcacgggaaccaacgcaagcgccgcaagatcctggagacggtgtagttgctgagcagcttgaataactatgatcccctgaaggacaagggcttttgggacacgcggaggcttaagtccactcggcgccgtaggttctttgagtttgggctgggggaccagcagctctgggtggaggctaag

SEQ ID NO: 2314 - DNA, 166 bp, Homo sapiens
ggccgacgtgttcttgcggtggcggagcggcggattatccttcgcggggcaaaatggagctcgaggccatgagcagatataccagcccagtgaacccagctgtcttcccccatctgaccgtggtgcttttggccattggcatgttcttcaccgactggttcttcgg

SEQ ID NO: 2315 - DNA, 178 bp, Homo sapiens
ctacgcttgctgtttgcgctctctgaaagggacaccaaggctgtgatttacaccaactgtcgagcactgcttctccatggagaaactagaaaaactgcttttggaattatctctacagtgaagaaacctcggccatcacaaggagatgaacattgtcttccagcttccatgaaagact

SEQ ID NO: 2316 - DNA, 151 bp, Homo sapiens
gacttgggctgaggagccgccgcgtcccctcgccgagtcccctcgccagattccctccgtcgccgccaagatgatgtgcggggcgccctccgccacgcagccggccaccgccgagacccagcacatcgtcgaccaggtgaggtcccagctt

SEQ ID NO: 2317 - DNA, 402 bp, Homo sapiens
ggcacgaggcgggttccttttttagaagctttgtgggttgatttttttttcttttcttttttggacatttttaattgcagtttaaaagtgaatcgtaagagaacctcagcattgtgcacgataagagaatgtgtcagtatttcagggttctacattttatctgtaaaatgtgacttttttttttttttatcacaccaaaagaaaaaggtggtttggccccgggggttttttataaaaaattaaccccccccttttttcacaaaaaaaaacagcggggagttttggccccattataaaaaaagggttcccacccaaatttttgtggggcctagggggccctcagaaatggcataaaaacttggaccggctaaaataaccccccaccctttttgaagtgggggg

SEQ ID NO: 2318 - DNA, 187 bp, Homo sapiens
gaccacgcttttcatctgtcccgctgcgtgttttcctcttgatcgggaactcctgcttctccttgcctcgaaatggaccccaactgctcctgctcgcctgttggctactgtgcctgtggcggctcctgcccatgctaagagtgcaaatgctcctcctgcaagaagaactgccgctcctgctggcctg

SEQ ID NO: 2319 - DNA, 155 bp, Homo sapiens
gaaagcagcagctgtattgccgcagttctagcttcaccttcacgatgtttcccttggtcaaaagcgcactaaatcgtctccaagttcgaagcattcagcaaacaatggcaaggcagagccaccagaaacgtacacctgatttttatgacaaataa

SEQ ID NO: 2320 - DNA, 314 bp, Homo sapiens
cattggtatttcattgtatgacaatgatgttcacttttaccactttcatttaacacagtactggaagttctagccagagcaataagaaaagagatagaaataaagtccatccaaattggaaatgcagaggtcaaattgtccttgtcatagacaattgatcttatattatgaaaaacctaaataattcatcaaaaaactgttagaattgataaacaaattcagtaagtttacaggctataaaatcaatatggaaaaatttgaagcatttctacatgccaacagtggacaatgtgaaaaagaaatcaagaaagcaa

SEQ ID NO: 2321 - DNA, 352 bp, Homo sapiens
ggtggaaaaaggaatcattgacccaacaaaggctgtgagaactgctttattggatgctgctggtgtggcctctctgttaactacagcagaagttgtagttacagaaattcctaaagaagaaaaagaccctggaatgggtgcaatgggtggaatgggaggcgttcttttactttctgtacgaagctatttctattaaaaaaccaaaaatctaatctcttacattattttttgcctttatacaaatatatttcctacttctatctcacagtcattctatatagcgtctcatactcctaattttactatatccactttatcaactttatcctctatacgaccttgtataaatatc

SEQ ID NO: 2322 - DNA, 289 bp, Homo sapiens
gcagagctaaggaagaagagcgcctaaataaactccgactggaaagcgaaggctctcctgaaactcttacaaacttaaggaaaggatacctgtttatgtataatcttgtgcaattcttgggattctcctggatctttgtcaacctgactgtgcgattctgtatcttgggaaaagagtccttttatgacacattccatactgtggctgacatgatgtatttctgccagatgctggcagttgtggaaactatcaatgcagcaattggagtcactacgtcaccggtgctgcc

SEQ ID NO: 2323 - DNA, 171 bp, Homo sapiens
gcaagcgccaccctagcaatatcaaccattaacctttcctctacacttatcatcttcacaattctaattctactgactatcctagaaaccgctgtcgccttaatccaagcctacgttttcacacttctagtaagcctctacctgcacgacaacacataaaaaaaaaaattc

SEQ ID NO: 2324 - DNA, 405 bp, Homo sapiens
cgttgctgtcggacctgccccggggccaggtggagaaagtgagggccgtacaaggaagtgaaattctgagttgttggggctaagcctgaccccctctccatgctccccgccccaacccactctggcctcagtagatttttttttcagttgtggttgttgcccaggctggagtgcagtggcgccatcttggctcactgcacctccaccttccgggctcaagcgattctccagcctcagcctcctgagtagctaggactgcaggtgctccaccacgcccggctaatttttgtatttttagtagagatggggtttccccatgttggccaggctggtctcgaactcctggcctcaggtgtgatccggccgcctccgcctccccagcgctgagatacaggggggagccac

SEQ ID NO: 2325 - DNA, 158 bp, Homo sapiens
gacttcaagggtacctgaagcgaattggcaccaaagcagcagctgtattgccgcagttctagcttcaccttcacgatgtttcccttggtcaaaagcgcactaaatcgtctccaagttcgaagcattcagcaaacagtggctaggcagagccaccagaa

SEQ ID NO: 2326 - DNA, 375 bp, Homo sapiens
cgttgctgtctttctatgagagaccgggctttaccatattacccacgaggctgttgaggtcctgagcttgagatacacccgcctccctcttccaaagctctgagattacagacttgagccaccttgtctggacggaaatctcagaattctttaagactgacctaattgctgcatcccaagtttacatgcactttcctttttattgtggtcgccacttgccctttgtgtcccacttcatgcctgtcatgttctacctgacttgcgacatggactgacggattatactgcccccagagaaggagcttgccatgcccggggaggacctgaaaatcaaactaatcttgcggcagacaatgatcttagagaaaggccagc

SEQ ID NO: 2327 - DNA, 427 bp, Homo sapiens
cctcgaatcgcccttttgcatgatcccatcgatcccaactccgcagatgtcgggggtgaagggagaagctgccggtcgcactcacaatgacgacgctcctgctattgctgctggagctccgggagctgggagaggcccaaggatcccttcacagatggaatacttcggcactatctccattggctgcccaccacagaacttcactggcatcttcgacactggctcctccaacctctgggtcccctctgtgtactgcactagcccagcctgcagtggaaggactaaccgtggttggccagcagtttggagaaagtgtcacagagccaggccagacctttgtggatgcagagtttgatggaattctgggcctgggatacccctccttggctgtgggaggagtgactccagcatttgacaacatgatggc

SEQ ID NO: 2328 - DNA, 314 bp, Homo sapiens
gggcgttggtggcagagatcatcctgacgacgctgctggccctggctgtatgcatgggtgccatcaatgagaagacaaagggccctctggccccgttctccatcggctttgccgtcaccgtggatatcctggctgggggccctgtgtctggaggctgcatgaattccgcccgtgcttttggacctgcggtggtggccaaccactggaacttccactggatctactggctgggcccactcctgactggcctgcttgttgcactgctcattatgtgcttcaatgcacaccggaagattcggcctcatccctgaagg

SEQ ID NO: 2329 - DNA, 321 bp, Homo sapiens
agacaaagggccctctggccccgttctccatcggctttgccgtcaccgtggatatcctggctgggggccctgtgtctggaggctgcatgaatcccgcccgtgcttttggacctgcggtggtggccaaccactggaacttccactggatctactggctgggcccactcctggctggcctgcttgttggactgctcattaggtgcttcattggagatgggaagacccgcctcatcctgaagcctcggtgaagcagagctcgtgggattcctgctgctccaggtgtcctcagctcacctgtcccagactcaagacaggggagtg

SEQ ID NO: 2330 - DNA, 270 bp, Homo sapiens
gacacgttggctgcgttttcggcgggcttcccgggtacaaaaatggctgtggctagcgatttctacctgcgctactacgtagggcacaagggcaagtttgggcacgagtttctggagttcgaatttcggccggacggaaagcttagatatgccaacaacagcaattacaaaaatgatgtgatgatcagaaaagaggcttatgtgcacaagagtgtaatggaagaactgaagagaattattgatgacagtgaaattacaaaagaagatgat

SEQ ID NO: 2331 - DNA, 331 bp, Homo sapiens
tgggggcgactaacctaccgagcctggtgatagctgcttggacgagatagaatcttaggtcaactttatattcggccacagaaccctctacatccccttgtgaatttatctgttagtccaaagaggaacagctgtttggacactatgaaaaaaccttgcggagagagtaaaaaatttaacacccatagttaacctaccgagcctggtgatagctggctggccaagatagaatcttagttcaactttaaatttgcccacagaaccctctaaatccccttgtaaattgaactgttagtccaaagaggaacagctctttggacactaagaaaag

SEQ ID NO: 2332 - DNA, 321 bp, Homo sapiens
aattaggagatgctgatctctcacattatgaatttctaaatcctagaaagaaaggcttggagagcttctgaatatagagaagtttcatttaaggactaggtcccccttgttgatgtatcaaaatattacagactctaaactgagacttaattctcaaatgtgttttacttgatctaaaataatctgtccacaaaaataaaattctaagtaataaattgttattttcccaccgggggaatcactaacccatttatgcctgagggtgcaattttttgaacttgaaaatcagaccttggcgatgactttgaacaaaatattaat

SEQ ID NO: 2333 - DNA, 167 bp, Homo sapiens
taaaacactgaactgaccattaacagcccaatatctacaatcaaccgacaagtcattattaccctcactgtctacccaacacaggcatgctcataaggaaaggtttgaaaaagtacaaggaactcggcaaatcttaccccgcctgtttaccaaaaacatcacctctt

SEQ ID NO: 2334 - DNA, 402 bp, Homo sapiens
agatgcctgctatcctgactaatttaagtcattagctgactgcatagctctttttcttgagaggctctccattttgattcagaaagttagcatatttattaccaatgaatttgaaaccagggcttttttttttttgggggaaggaaaacccacctccttccccccaaaaaattaaaaaaggccccttggtttctttattaaggaacccccttctaattaatgggccaaaccccaaggaacaaaaatttcccaatattctgcgcccccgaaaaagaggtgcctttttaagaaaacacgttttttacctttaaccaaaaacccagggggaaaaataaaaccttcgggggggaaatccggggggtgaaaaaaaggggccttccattccccccccgtttttttttt

SEQ ID NO: 2335 - DNA, 367 bp, Homo sapiens
agttgtgatacgaatagaacaaaaaaaaaaaaacccttaaacttttgtggggaccccaaggagttgggaacttggggaaaaataaccccggccccagcggttcccacccacattccatttttttctttggaacggatttagtaaggcccaaagggggaaccccttctttggaaaaaagtcccaattggggtctaaaacgggggaaaaaaaacaacccggccgccacttggttaaacctaaaagcttttaaaaacccaatatattcggccaaaaatatccctggatggtaacccctcaccccataggggtttttggtttttaaacaaaataatatttgtcggggggggaaaaacccttggctttcaaa

SEQ ID NO: 2336 - DNA, 188 bp, Homo sapiens
ggctgcctctaggttctgggaagatggcgaaggtctcagagctttacgatgtcacttgggaagaaatgagggataaaatgagaaaatggagagaagaaaactcaagaaatagtgagcaaattgtggaagttggagaagaattaattaatgaatatgcttttaagctggggagatgatatttggtatat

SEQ ID NO: 2337 - DNA, 393 bp, Homo sapiens
cgttgctgtcggaaaaggccaagatagcatagaacctgttcccggtcaaaaggggaaaaaaaaagcagtggagcagcgtgacttcattggagtggacagcacaggaaagaggctgctcttcatggctaatgaagcagacttggatgaagagctggtcattaagggatccatcctacagaagtcaataacttctatccggagtgaactgattccatatttagtgagaaaacagttttcctcagcttcctcacaacagggacaagaagaaaaagaggaggatctaaagaaaaaggagctgaagtccttagatatctacagttttataaaagaagccaatacactgaacctggctccctatgatgcctgctggaatgcctgtcgaggagacaggtg

SEQ ID NO: 2338 - DNA, 172 bp, Homo sapiens
  misc_feature (1)...(172): n = A,T,C or G
atnaacaaacttaagtatgccctgacaggagatgaaactaagaagatttgcgtgcagcggttcattaaaatcgatggcaaggtacgaactgatataacctaccctgctggattcatggatgtcatcagcattgacaagacgagagagaatttccgtctgatctatgacaccg

SEQ ID NO: 2339 - DNA, 396 bp, Homo sapiens
  misc_feature (1)...(396): n = A,T,C or G
cgttgctgtcggtgacctgcagagcctgttggggtacacccctgaggagctgcacgccatgctggacgtcaagccagatgccgacgagtgatggcactgaaggggctggggaaaccctgctgagaccttccaaggacagccgtgttggttggactctgaattttgaattgttattctattttttattttccagaactcattttttaccttcaggggtgggagctaagtcagttgcagctgtaatcaattgtgcgcagttgggaaaggaaagccaggacttgtggggtgggtgggaccagaaattcttgagcaaattttcaggagagggagaagggccttctcagaagcttgaaggctctggcttaacagagaaagagactaatgtgtccaatcatn

SEQ ID NO: 2340 - DNA, 385 bp, Homo sapiens
cgttgctgtcgccaaaatcgcaccactgtactccagcctgggtggcagagtgagactccgtctcaaaaaaaaaaaagggccttaacctatcccttaggacaaagggacttaaaaaatttttacaaaactttttatccggggagggcaaaatatactttttattcttcaccccagggaacattctccaaaataaaccatatgatgggccccaaaacaagtctcaataattttaaaaaaatggaaattatatcaggtcctcttttaaaccacaggggaataaaatgggaaatcacctccaaagggacccctcaaagccttgcaaagacatggaaattaaataccctgctccgggattatggtggggtcaataacaaaatcgagaggg

SEQ ID NO: 2341 - DNA, 352 bp, Homo sapiens
  misc_feature (1)...(352): n = A,T,C or G
acataagttgcaatactgacataccctgagaatttgatcaccttcctctaagccttccttggctgcagggctatcttctagaacgccagctacaaatattccaacatcatttccaccagccagccgcaaacccacactatctccttttctgaattttaccaatttcatgctgggcctgttaaaacagatatttcatttgaaacagttaagaagagcttaaaacgttgtagcaatcactacagtgaaaactatattcagaattaaataaagaaccatcatttctaaaacttctctcataccactattttactaaataaaatttagtgttagaattcaaatcagacttaataan

SEQ ID NO: 2342 - DNA, 388 bp, Homo sapiens
aattaggagatgctgatctctcacattatgaatttctaaatcctagaaagaaaggcttggagagcttctgaatatagagaagtttcatttaaggactaggtcccccttgttgatgtatcaaaatattacagactctaaactgagacttaattctcaaatgtgttttacttgatctaaaataatctgtccacaaaaataaaattctaagtaataaattgttattttcccaccgtgggaatcactaacccatttatgcctgaggttgcaattttttgaactgcaaaatcagaccttggcgatgactttgaacaagatataaataacttccacatgcttagcgttccaataatggaacactgggcatataatgtgaaatgtattctatgaa

SEQ ID NO: 2343 - DNA, 183 bp, Homo sapiens
  misc_feature (1)...(183): n = A,T,C or G
acgttccnccgctatatgcggcggtctggcaggaatgggaggcatccataacgagaaggagaccatgcaaagcctgaacgaccgcctggcctcttacctggacagagtgaggagcctggaatacgaaaaccggaggctggagagcaaaatccgggagcacttggagaataagggaccccaggt

SEQ ID NO: 2344 - DNA, 405 bp, Homo sapiens
cgttgctgtcgggcatgtgcctgtggtcctagctactcatgaggctgaggtaggaggatcacttgagcctgggaggtcgaggctgcagtgagccatgaacatgctactgcattccagcctgggcaacagagtgagaccctggctcaaaaaacaaaaacaaaaactagtttgttttagtattcattaattacgtatatgagcactggtagtctagtgtttgttcttgtatacagagttttcttaaatgagatgatgctatttaattctgttacttgttttttcaactaatggatcttttaaagttttttatttaaattttttgtgggtacatattaggtacatatacttatggggtacatgagatgtttttataaaggctcagctaatgtatcttgaatatcatgt

SEQ ID NO: 2345 - DNA, 329 bp, Homo sapiens
  misc_feature (1)...(329): n = A,T,C or G
ggagctcagagctaaggaagaagagcgcctaaataaactccgactggaaagcgaaggctctcctgaaactcttacaaacttaaggaaaggatacctgtttatgtataatcttgtgcaattcttgggattctcctggatctttgtcaacctgactgtgcgattctgtatcttgggaaaagagtccttttatgacacattccatactgtggctgacatgatgtatttctgccagatgctggcagttgtggaaactatcaatgcagcaattggagtcactacgtcaccggtgctgccttctctgatccagcttcttggaagaaattntattt

SEQ ID NO: 2346 - DNA, 394 bp, Homo sapiens
ggcacgaggccggccaatgccggaccgctttggcaccgtccgcccgatctctccacccgtgggccggcaatggcgggcgcagtttcgctcttgggtgtggtggggctgctgcttgtgtctgcgctgtccggggtcctaggagaccgagcctatcccgacctccggacacacccagggaacgcagcccaccccggctctggagccacggaaccccggcggcgaccaccgctcaaggatcaacgcgagcggacccgggccgggtcgctgcctctgggggcgctgtacaccgcggccgtcgcggcttttgtgctgtacaagtgtttgcaggggaaagatgaaactgcggttctccacgaggaggcaagcaagcagcagccactgcagtcagagcaac

SEQ ID NO: 2347 - DNA, 162 bp, Homo sapiens
attatgacagaggttactctagcctgcttaaaagagattttggggcaaaaactcagaatggtgtttacagtgctgcgaattacaccaatgggagctttggaagtaattttgtgtctgctggtatacagaccagttttaagactggtaattcaacagggactt

SEQ ID NO: 2348 - DNA, 358 bp, Homo sapiens
  misc_feature (1)...(358): n = A,T,C or G
cgttgctgtcgattcanaattgggatgggggttggggtgaagcacacttattatcttcagttgcagtgatttcaaatttaagattttttgttgttggtttgaactgtccccttagtttcttgttatttccaatttgttctgcttagtcattacttttaattcttttcttactaaaattttatggaggttgggggaagggagttagcatcactaacctgacagttgttgccaggaatttgctctgtttactgctagtatattagaaatcctagatctcagaatcacaatagtaataaacaacaggggtcattttttcctaacttactctgtgttcaagtgtggaatttctgtctcccan

SEQ ID NO: 2349 - DNA, 420 bp, Homo sapiens
tctactgtggcactatttaagcaagttaaaatttagttaaaccctctcattattaaagaggaaaggcgatggtgatgtctgtagtacaatataaaccataattgtgatttaccttaagtaggtataactcttatgggatatacagtatagtttttgtgaatctttacatgacagcattatctttttataattttttttcctaagataaacaaatgcatagttttcttctatgggtgatagaaacagctttttgaagtaatgaaaacctcaaaagatcatgttgattcttaatttttgccttttgcataagcctctttataacatgtatctttaaaaccaattaagtctttaggaatgtgtaaccagaactatgttagtattgcttataaaactttaggtagggtcaatatatacctatag

SEQ ID NO: 2350 - DNA, 373 bp, Homo sapiens
cgttgctgtcgaataagatgtattctttataattgaattggtttttcccacgtctaactggaaacaaaacagaaggggcgtcataaatttgaataagcagaacatactgttctcaacatactgtaatcaaaaggaggaatttcagtgggtctctgtgtgtatgagagagagagtgtgtgtttgtgtgtttcaaggtcacaacaggcttttttgtttttgttttttgctctttgctccttttcgagaaggaggcctgctcttgccgcccaggctggattccacacgcgccctctccatccactgtatcctctgccctccagggtcagccaggactactgcctcctcctccggacgaactgggacccccccaccc

SEQ ID NO: 2351 - DNA, 294 bp, Homo sapiens
  misc_feature (1)...(294): n = A,T,C or G
ggcggctggcctgcatcggggacgagatggacgtgagcctcagggccccgcgcctggcccagctctccgaggtggccatgcacagcctgggtctggctttcatctacgaccagactgaagacatcagggatgttcttanaagtttcttggtcgggttgaccacccttaaggataacatttttattttttggagacacccaaaccccggttcctgtttctccttctcacacgatctttcttctctttggttgttgccgtttgcgttgttttcctcacgtcttccccttgcctgtc

SEQ ID NO: 2352 - DNA, 322 bp, Homo sapiens
  misc_feature (1)...(322): n = A,T,C or G
aaatatagaaacaaaagattattgccagccaccacaaatacacacttaactatgtagaccattgaaactataaagcaactacacaatcaagtctacatgacaaccgcttaacaacacaatgacacgatcaatttttcacatatctacattaaccttggacacaaaagggctaaacagctcacttaaaaggtacagagtggcaagttagatacagaagcaagacctgactgcatgctgtcttcaagagatccatctcacatgcagtaacatctatgggctcaaagtaaagggattgagaaacatgtttgaagtaaatggaaan

SEQ ID NO: 2353 - DNA, 164 bp, Homo sapiens
aggttccccttcggctacaggaaggcaggaggggtgagtcccctactccctcttcactgtggccacagcccccttgccctccgcctgggatctgagtacatattgcggtgatggagatgcagtcacttattgtccaggtgaggcccaagagccctgtggccgcc

SEQ ID NO: 2354 - DNA, 284 bp, Homo sapiens
gacgttggctgcgttttcggcgggcttcccgggtacaaaaatggctgtggctagcgatttctacctgcgctactacgtagggcacaagggcaagtttgggcacgagtttctggagttcgaatttcggccggacggaaagcttagatatgccaacaacagcaattacaaaaatgatgtgatgatcagaaaagaggcttatgtgcacaagagtgtaatggaagaactgaagagaattattgatgacagtgaaattacaaaagaagatgatgctttgtggcctcccc

SEQ ID NO: 2355 - DNA, 388 bp, Homo sapiens
ggcacgagatgagcccagccttcagggtctttgatgtggagccccgcgccaaaggcgtccttctggagccctttgtccaccaggtcggggggcactcatgcgtgctccgcttcaatgagacaaccctgtgcaagcccctggtcccaagggaacatcagttctacgagaccctccctgctgagatgcgcaaattcactccccagtacaaaggacaaagccaaaggccccttgttagctggccatccctgccccattttttcccctggtcctttcccctgtggccacagggaagtgtggcctgaataccccaccccggctcctctgcacccaaagctgggggccacctcagaagtgtcatctctctttgagcacgcattcccctggagag

SEQ ID NO: 2356 - DNA, 336 bp, Homo sapiens
ggaaaaccagctctgaggttgagccattgataaatgcttataaacatcttggccaagaggacacatcagcccaaggaggactagaggcacaaatatgccagctacctttggacatttggcagggggatacaatggccactattatggatatctttggagtgaagtattttccatggatatgttttacagctgttttataacagaagggatcatgaacacggaggttggaacgaatttccgaaggctcaccctgatacctgcgggatctctggacggggtggacatgctacacaatttcttggacgtgagtgaagcctcagagcgtttctacagact

SEQ ID NO: 2357 - DNA, 325 bp, Homo sapiens
ggatgacgtcactgcaaggcgccgggggacacgttggctgcgttttcggcgggcttcccgggtacaaaaatggctgtggctagcgatttctacctgcgctactacgtagggcacaagggcaagtttgggcacgagtttctggagttcgaatttcggccggacggaaagcttagatatgccaacaacagcaattacaaaaatgatgtgatgatcagaaaagaggcttatgtgcacaagagtgtaatggaagaactgaagagaattattgatgaccgtgaaattaccaaagaagatgatgctttgtggccttcccctgataagggtg

SEQ ID NO: 2358 - DNA, 405 bp, Homo sapiens
tgagcccagccttcagggccatggatgtggagccccgcgccaaaggcgtccttctggagccctttgtccaccaggtcggggggcactcatgcgtgctccgcttcaatgagacaaccctgtgcaagcccctggtcccaagggaacatcagttctacgagaccctccctgctgagatgcgcaaattcactccccagtacaaaggacaaagccaaaggccccttgttagctggccatccctgccccattttttcccctggtcctttcccctgtggccacagggaagtgtggcctgaataccccaccccggctcctctgcacccagagctgggggccacctcagaagtgtcatctctctctgagcacgcattcccctgcagcagtcgaggactgagcagattgagtgat

SEQ ID NO: 2359 - DNA, 387 bp, Homo sapiens
ggcacgagggcgagtgtagtgcttccgagcggatcccagtgtgcggcggcagcggcggcggcggcgcctcccgggctccggctccggcttctgctgttgctcttctccgccgcggcactgatccccacaggtgatgggcagaatctgtttacgaaagacgtgacagtgatcgagggagaggttgcgaccatcagttgccaagtcaataagagtgacgactctgtgattcagctactgaatcccaacaggcagaccatttatttcagggacttcaggcctttgaaggacagcaggtttcagttgctgaatttttctagcagtgaactcaaagtatcattgacaaacgtctcaatttctgatgaaggaagatacttttgccagctctat

SEQ ID NO: 2360 - DNA, 413 bp, Homo sapiens
gactgctgcagccggcgctgggcccaggcaccaccgcggtgctgctgctgcagatctccacgcggccggaggatctcggggagacagtctgctccctcaagttcgccgaccgagtgggtcaagtggagctggggccagcccggcgccgcagggtcccgcgctcctccgggacgccttcttccctcagcaccgacactccgctcaccgggaccccctgcacccctacgccgtcccctggcagtcctccatgccccagtcccgacaacggctcgggctcggctctcgcgcccgcagagggcctgcccctctagtcctgggtcgcggccctgcccatggggtctcaggccaggtctctgctggcagaggcggtagtaaagtccctgtaccccgtctcccagggcacaagctcccta

SEQ ID NO: 2361 - DNA, 318 bp, Homo sapiens
gatgctcggggctgccttggccaaggcggtgagtcctgaggagaggttctggaatgcatctggggcggcctttgtgacagtccaggagcaggggcaggtggcaggggcgttggtggcagagatcatcctgacgacactgctggccctggctgtatgcatgggtgccatcaatgagaagacaaagggccctctggccccgttctccatcggctttgccgtcaccgcggatatcctggctgggggccctgtgtctggaggctgcatgaatcccgcccgtgcttttggacctgcgggggtggccaaccactggaactttcg

SEQ ID NO: 2362 - DNA, 321 bp, Homo sapiens
cagccatgtctggtcgaactgctgggctctgctctcttcatcttcatcgggtgcctgtcggtcatcagaatgggacggacactgggctgctgcagacggccctggcccacgggctggctttggggctcgtgattgccacgctggggaatatcagtggtggacacttcaaccctgcggtgtccctggcagccatgctgatcggaggcctcaacctggtgatgctcctcccgtactgggtctcacagctgctcggggggatgctcggggctgccttggccaaggcggtgagtcctgaggagaggctctggaatgcatctgggg

SEQ ID NO: 2363 - DNA, 386 bp, Homo sapiens
  misc_feature (1)...(386): n = A,T,C or G
cgttgctgtcggctgcgcgtcgcangagtaacctacttggtctcctgctttcgcgacatggccttcaattttggggctccctcgggcacctccggtaccgctgcagccaccgcggcccccgcggatcatatctgaagatattagtgagctacaaaagaatcaaactacatctgtagccaaaattgcacaatacaagaggaaactcatggatctttcccatagaactttacaggtcctaatcaaacaggaaattcaaaggaagagtgggtatgccattcaggctgatgaagagcagttgcgagttcagctggatacgattcagggtgaactaaatgcacctactcagttcaagggccgactaaatgaattgatgtctcaaatcaggg

SEQ ID NO: 2364 - DNA, 381 bp, Homo sapiens
ggcacgagggtaagaagagctgtcgcattacccaggcatcgtggatggccccgcagccctggatagcttcccagagacagtgcccccagtaccagggccctatggaccgcaccggccttcccagaccctgcccccaggcttggacagcgacggtctgaagagggagaaggatgagatctatggacacccgctcttccccctcttggccctggtctttgagaaatgtgaacctggctacatgctctccccgtgacggggccggagctgggctggggacaccccctggaggagatgtctgctcctctgattacttcaacgaggacatcgctgcctttgccaagcaggtccgctctgagaggcccctcttcttcttcaacccag

SEQ ID NO: 2365 - DNA, 382 bp, Homo sapiens
cgttgctgtcggcagattctgcagccatcaaacatccagcagcagcaaagcctgcagccgccaccaccaccaccacagccgcaccttggcgtgagctcagcagccagcggccacctgggccggagcttcctgagtggagagccgagccaggcagacgtgcagccactgggccccagcagcctggcggtgcacactattctgccccaggagagccccgccctgcccacgtcgctgccatcctcgctgggcccacccgggaccgcagcccagttcctgacgcccccctcgcagcacagctactgctcgcctgtggacaacacccccagccaccagctacaggtgcctgagcacccctttctcaccccgtcccctgagtcccctg

SEQ ID NO: 2366 - DNA, 319 bp, Homo sapiens
  misc_feature (1)...(319): n = A,T,C or G
ggggtacaaaaatggctgtggctagcgatttctacctgcgctactacgtagggcacaagggcaagtttgggcacgagtttctggagttcgaatttcggccggacggaaagcttagatatgccaacaacagcaattacaaaaatgatgtgatgatcagaaaagaggcttatgtgcacaagagtgtaatggaagaactgaagagaattattgatgacagtgaaattacaaaagaagatgatgctttgtggcctccccctgatagggttggccgacaggagcttgaaattgtaattggagatgagcacatatcttttaccan

SEQ ID NO: 2367 - DNA, 397 bp, Homo sapiens
ggatgacgtcactgcaaggcgccgggggacacgttggctgcgttttcggcgggcttcccgggtacaaaaatggctgtggctagcgatttctacctgcgctactacgtagggcacaagggcaagtttgggcacgagtttctggagttcgaatttcggccggacggaaagcttatatatgccaacaacagcaattacaaaaatgatgtgatgatcagaaaagaggcttatgtgcacaagagtgtaatggaagaactgaagagaattattgatgacagtgaaattacaaaagaagatgatgctttgtggcctccccctgatagggttggccgacaggagcttgaaattgtaattggagatgagcacatatcttttaccacatcaaaaaataagttctctt

SEQ ID NO: 2368 - DNA, 406 bp, Homo sapiens
attcgaattccgttgctgtcggcggcatcaaactctttttgactgctcccctatctccaccccggagctgctcactccgtgcggctcggcggagtacatggccccggaggtagaggaggccttcaacgaggaggctagcatctacgacaagcgctgcgacctgtggagcctgggcgtcatcttgtatatcctactcagcggctacccgcccttcgtgggccgctgtggcagcgactgcggatgggaccgcggcgaggcctgccctgcctgccaaacatgctgtttgagagcattcaagagggcaagtacgaagttccccgacaggactgggcccacatcttctgcgctgccaagacctcatattcaagctgttggtccggacccccaacagaggctgtatgccgcg

SEQ ID NO: 2369 - DNA, 404 bp, Homo sapiens
cgttgctgtcgggagacttgaggagttgctgaggtgccacgtgtacctgggcacgaggatatgatgtttcagcttctccgaggtctggactttcttcattcacaccgagtagtgcatcgcgatctaaaaccacagaacattctggtgaccagcagcggacaaataaaactcgctgacttcggccttgcccgcatctatagtttccagatggctctaacctcagtggtcgtcacgctgtggtacagagcacccgaagtcttgctccagtccagctacgccacccccgtggatctctggagtgttggctgcatatttgcagaaatgtttcgtagaaagcctctttttcgtggaagttcagatgttgatcaactaggaaaaaacttggacgtgattggactcccagg

SEQ ID NO: 2370 - DNA, 418 bp, Homo sapiens
cgttgctgtcgatgggactagattctaaaatttatttgggaccatgggaatgatagttgggaagaaaactatttgcacacgacagatttctagatactttttgctgctagttttatgtaatatttattgaacattttgacaaatatttatttttgtaagcctaaaagtgattctttgaaagtttaaagaaacttgaccaaaagacagtacaaaaacactggcacttgaatgttgaatgtcaccgtatgcgtgaaattatatatttcggggtagtgtgagcttttaatgtttaagtcatattaaactcttaagtcaaattaagcagacccggcgttggcagtgtagccataactttctgatgttagtaaaaacaaaattggcgacttgaaattaaatcatgccaaggttttgatacact

SEQ ID NO: 2371 - DNA, 400 bp, Homo sapiens
  misc_feature (1)...(400): n = A,T,C or G
cgttgctgtcgagattttcaagtgtattgtgccttgctctaaaacttttattaagtaggtgcacttgacagtattgaggtcatttgttatggagctatttcaattagtctaggtttaggcccttgtacattttgcccataactttttacaaagtacttcttttattgcacattcagagaattttatatatatgtcttgtgtgcgtgtccttaaacttccaatcttactttgtctcttggagattgttgaacgcagcttgtctaggaaggggatgggactagattctaaaatttatttgggaccatgggaatgatagttgggaagaaaactatttgcacacgacagatttctagatactttctgctgctagntttatgtgatatttattgaacattttgag

SEQ ID NO: 2372 - DNA, 385 bp, Homo sapiens
cgttgctgtcgaaaacttttattaagtaggtgcacttgacagtattgaggtcatttgttatggtgctatttcaattagtctaggtttaggcccttgtacattttgcccataactttttacaaagtacttcttttattgcacattcagagaattttatatatatgtcttgtgtgcgtgtccttaaacttccaatcttactttgtctcttggagattgttgaacgcagcttgtctaggaaggggatgggactagattctaaaatttatttgggaccatgggaatgatagttgggaagaaaactatttgcacacgacagatttctagatactttttgctgctagttttatgtaatatttattgaacattttgacaaatatttattttt

SEQ ID NO: 2373 - DNA, 375 bp, Homo sapiens
cgttgctgtcgatccccctggcccaggatcatgaggatgagaatgaagaaggtggtgaggtcccctgggccccgcctgaaggatcagaggcagcagaggaggcagcccccagtgaccgcatgccgtcagcccggcccccctcgccgccactgtcaagctgggagcgggtgtcacggctcatggaggaggaccctgccttccgtcgtggtcgtcttcgctggctcaagcaggagcagctacggctgcagggactgcagggctctgggggccggggcggggggctgcgcaggcccccagcccgctttgtgccccctcacgactgcaagctacgcttccccttcaagagcaacccccagcaccgggagtcttggccag

SEQ ID NO: 2374 - DNA, 380 bp, Homo sapiens
cgttgctgtcggaggtcccctgggccccgcctgaaggatcagaggcagcagaggaggcagcccccagtgaccgcatgccgtcagcccggcccccctcgccgccactgtcaagctgggagcgggtgtcacggctcatggaggaggaccctgccttccgtcgtggtcgtcttcgctggctcaagcaggagcagctacggctgcagggactgcagggctctgggggccggggcggggggctgcgcaggcccccagcccgctttgtgccccctcacgactgcaagctacgcttccccttcaagagcaacccccaacaccgggagtcttggccagggatggggagcggggaggctccaactccggtccaaccccctgaggaggcg

SEQ ID NO: 2375 - DNA, 373 bp, Homo sapiens
cgttgctgtcggccgccactgtcaagctgggagcgggtgtcacggctcatggaggaggaccctgccttccgtcgtggtcgtcttcgctggctcaagcaggagcagctacggctgcagggactgcagggctctgggggccggggcggggggctgcgcaggcccccagcccgctttgtgccccctcacgactgcaagctacgcttccccttcaagagcaacccccagcaccgggagtcttggccagggatggggagcggggaggctccaactccgctccaaccccctgaggaggtcactccccatccagccacccctgcccgccggcctccgagtccccgaaggtcccaccatccccgcaggaactccctggatg

SEQ ID NO: 2376 - DNA, 310 bp, Homo sapiens
attacagtacagaagaaagtgagtcagtggtgggagagactcacaaagcaggaaaagcgaccactgtttttggctcctgactttgatcgttggctggatgaatctgatgcggaaatggagctcagagctaaggaagaagagcgcctaaataaactccgactggaaagcgaaggctctcctgaaactcttacaaacttaaggaaaggatacctgtttatgtataatcttgtgcaattcttgtgattctcctggatctttgtcaacctgactgtgcgattctgtatcttgggaaaagagtccttttatgaca

SEQ ID NO: 2377 - DNA, 426 bp, Homo sapiens
cgttgctgtcgggaggaggaccctgccttccgtcgtggtcgtcttcgctggctcaagcaggagcagctacggctgcagggactgcagggctctgggggccggggcggggggctgcgcaggcccccagcccgctttgtgccccctcacgactgcaagctacgcttccccttcaagagcaacccccagcaccgggagtcttggccagggatggggagcggggaggctccaactccgctccaaccccctgaggaggtcactccccatccagccacccctgcccgccggcctccgagtccccgaaggtcccaccatccccgcaggaactccctggatggagggggccgatcccggtgaaggggttctgcacagcctgaaccccagcacttccagcccaaaaagcacaactcttatccccagccaccccat

SEQ ID NO: 2378 - DNA, 354 bp, Homo sapiens
ggacacatcagcccaaggagtactagaggcacaaatatgccagctacctttggacatttggcagggggatacgatggccaatattatggatatctttggagtgaagtattttccatggatatgttttacagctgttttaaaaaagaagggataatgaatccggaggttggaatgaaatacagaaacctaatcctgaaacctgggggatctctggacgggatggacatgctccacaatttcttgaaacgtgaggccaaccaaaaagcgttcctaatgagtagaggcctgcttgctcccggaactggggaactttgggagccgggcatgtctggaggaatagtcgaaatccccatg

SEQ ID NO: 2379 - DNA, 450 bp, Homo sapiens
  misc_feature (1)...(450): n = A,T,C or G
ggatgcgtagacgcacgtgntntttgaggagaccccctcatacgcgcgcgtgcttttttggccgaagcggtctacgtgtgagataacacgacagagggggagcccatggagtactaaaggcacaaatatgccagctacctttggacatttggcagggggatacgatggccaatattatggatatctttggagtgaagtattttccatggatatgttttacagctgttttaaaaaagaagggataatgaatccggaggttggaatgaaatacagaaacctaatcctgaaacctgggggatctctggacggcatggacatgctccacaatttcttgaaacgtgagccaaaccaaaaagcgttcctaatgagtagaggcctgcatgctccgtgaactggggatctttggtagccgtccatgtctggaggacaagtcgacatcaccatgtgttt

SEQ ID NO: 2380 - DNA, 418 bp, Homo sapiens
catcgattcgaattccgttgctgtcgcccacctctactgtttgaaaaaatacatcgtggatttcctaatggaaaatgggtcaataacttctatccggagtgaactgattccatatttagtgagaaaacagttttcctcagcttcctcacaacagggacaagaagaaaaagaggaggatctaaagaaaaaggagctgaagtccttagatatctacagttttataaaagaagccaatacactgaacctggctccctatgatgcctgctggaatgcctgtcgaggagacaggtgggaagacttgtccagatcacaggtgcgctgctatgtccacatcatgaaagaggggctctgctctcgagtgagcacactgggactctacatggaagcaaacagacaggtgcccaaattgctgtctgct

SEQ ID NO: 2381 - DNA, 408 bp, Homo sapiens
cgttgctgtcggaaatcaactgtaagtgcttaaagacattgtctgtctctgaggatagaagtatctgcctgcagccaagacttcattttgatggcaaatacattgtctgtagttcagcacttggtctctaccagtgggactttgccagttatgatattctcagggtcatcaagactcctgagatagcaaacttggccttgcttggctttggagatatctttgccctgctgtttgacaaccgctacctgtacatcatggacttgcggacagagagcctgattagtcgctggcctctgccagagtacaggaaatcaaagagaggctcaagcttcctggcaggcgaagcatcctggctgaatggactggatgggcacaatgacacgggcttggtctttgccaccagcatgg

SEQ ID NO: 2382 - DNA, 382 bp, Homo sapiens
cgttgctgtcgccggagccgaaacaccggtaggagcggggaggtgggtactacacaaccgtctccagcaatgaccaatgaagctggagctcctcggcttatgataactcatattgtaaaccagaacttcaaatcctatgctggggagaaaattctgggacctttccataagcgcttttcctgtattatcgggccaaatggcagtggcaaatccaatgttattgattctatgctttttgtgtttggctatcgagcacaaaaaataagatctaaaaaactctcagtattaatacataattctgatgaacacaaggacattcagagttgtacagtagaagttcattttcaaaagataattgataaggaaggggatgattatgaag

SEQ ID NO: 2383 - DNA, 326 bp, Homo sapiens
gagtacagctctctggaacatgagagtgcaaggggtgtgattgagtgtttgaagattgtcacacgagccaagtctcagcggattgcaaagttcgcctttgactatgccaccaagaaggggcggggcaaggtcactgctgtccacaaggccaacatcatgaaacttggggatgggttgttcctgcagtgctgtgaggaagttgctgaactgtaccccaaaatcaaatttgagacaatgatcatagacaactgctgcatgcagctggtgcagaatccttaccagtttgatgtgcttgtgatgcccaatctctatgggaacattattga

SEQ ID NO: 2384 - DNA, 404 bp, Homo sapiens
cgttgctgtcggaggtgaccaagcaattagaggtgataacagcccaagacactgtaattaaagctaaatatgcagaagtggcaaaacacaaggagcaaaacaatgattctcagcttaaaattaaggaattagaccacaacatcagcaaacataaacgggaggctgaagatggtgctgcaaaggtatccaaaatgttgaaagattatgactggattaatgcagagagacacctctttggccaacccaatagtgcctatgatttcaaaactaacaaccctaaagaagctggtcagagacttcagaagttgcaagaaatgaaggagaaactaggaagaaatgtcaatatgagagctatgaatgtattgacagaagctgaagagcgatacaatgacttgatgaagaaa

SEQ ID NO: 2385 - DNA, 388 bp, Homo sapiens
cgttgctgtcgctttgtgacaacagtttaggacttatctctgagaatctggaaacatggggaatgtgctcaaactatccgacttccagctcagtctatatggtgctgctgtgtgctcgacaatggtgacattgtggttgtgatggcattattagagtgcttacagaatcagaagatcgaacagcaagtgctgaagaaatcaaggcttttgaaaaagaactgtctcacgcaaccattgattctaaaactggcgatttaggggacatcaatgctgagcagcttcctgggagggaacatcttaatgaacctggtactagagaaggacagactcgtctaatcagagatggggagaaagtcgaagcctatcagtggagtgttagtgaagggag

SEQ ID NO: 2386 - DNA, 391 bp, Homo sapiens
cgttgctgtcgaaaatttgttaacccagaagatgttgccagactgatatttagtaaaatgaaagaaacggcacattctgtattgggctcagatgcaaatgatgtagttattactgtcccgtttgattttggagaaaagcaaaaaaatgctcttggagaagcagctagagctgctggatttaatgttttgcgattaattcacgaaccgtctgcagctcttcttgcttatggaattggacaagactcccctactggaaaaagcaatattttggtgtttaagcttggaggaacatccttatctctcagcgtcatggaagttaacagtggaatatatcgggttctttcaacaaacactgatgataacatcggtggtgcacatttcacagaaacct

SEQ ID NO: 2387 - DNA, 340 bp, Homo sapiens
gagtacagctctctggaacatgagagtgcaaggggtgtgattgagtgtttgaagattgtcacacgagccaagtctcagcggattgcaaagttcgcctttgactatgccaccaagaaggggcggggcaaggtcactgctgtccacaaggccaacatcatgaaacttggggatgggttgttcctgcagtgctgtgaggaagttgctgaactgtaccccaaaatcaaatttgagacaatgatcatagacaactgctgcatgcagctggtgcaaaatccttaccagtttgatgtgcttgtgatgcccagtctctatgggaacattattgacaatctggctggtg

SEQ ID NO: 2388 - DNA, 411 bp, Homo sapiens
cgttgctgtcggattctgaaaagttaattcctgtaccaatggtgggttttaaggaacttctccgaagactgaaggttcaagatcagatgactaagcagcatcaaaccagattagatatcatatctgaagatattagtgagctacaaaagaatcaaactacatctgtagccaaaattgcacaatacaagaggaaactcatggatctttcccatagaactttacaggtcctaatcaaacaggaaattcaaaggaagagtggttatgccattcaggctgatgaagagcagttgcgagttcagctggatacgattcagggtgaactaaatgcacctactcagttcaagggccgactaaatgaattgatgtctcaaatcaggatgcagaatcattttggagcagtcagatctgaag

SEQ ID NO: 2389 - DNA, 442 bp, Homo sapiens
  misc_feature (1)...(442): n = A,T,C or G
tcgattcgaattccgttgctgtcgatgctatgcttgcaccaccagagggtcaaactgttttggatggtctggagttcaaggttgccttaagaaatacctggaaagaaaacctaactgaacttagtggtggtcagaggtctttagtggccttgtcattaatactgtccatgcttctcttcaaacctgctccaatttatatccttgatgaggtagatgcagccttggatctttctcatacccaaaacattggacagatgctgcgtactcatttcacacattctcagttcattgtggtgtcactaaaagaaggtatgttcaacaatgcaaacgttcttttcaaaaccaagtttgtggatggtgtttctacagtagccagatttactcaatgtcaaaatggaaagatttcataggaagcanaatccaaggcagaaccacccanagg

SEQ ID NO: 2390 - DNA, 408 bp, Homo sapiens
cgttgctgtcgggactttgggtctattttttctactcttttgcctggtgctaatgctatgcttgcaccaccagagggtcaaactgttttggatggtctggagttcaaggttgccttaggaaatacctggaaagaaaacctaactgaacttagtggtggtcagaggtctttagtggccttgtcattaatactgtccatgcttctcttcaaacctgctccaatttatatccttgatgaggtagatgcagccttggatctttctcatacccaaaacattggacagatgctgcgtactcatttcacacattctcagttcattgtggtgtcactaaaagaaggtatgttcaacaatgcaaacgttcttttcaaaaccaagtttgtggatggtgtttctacagtagccagattt

SEQ ID NO: 2391 - DNA, 356 bp, Homo sapiens
ctggactgaaatataaaccagtgactaaccaggttgagtgtcacccatacctcacacaggagaaactgatccagtactgccactccaagggcatcaccgttacggcctacagccccctgggctctccggatagaccttgggccaagccagaagacccttccctgctggaggatcccaagattaaggagattgctgcaaagcacaaaaaaaccgcagcccaggttctgatccgtttccatatccagaggaatgtgattgtcatccccaagtctgtgacaccagcacgcattgttgagaacattcaggtctttgactttaaattgagtgatgaggagatggcaaccatactcagcttt

SEQ ID NO: 2392 - DNA, 400 bp, Homo sapiens
cgttgctgtcggtccggagtataggaatatgcagaaataggatatgatgtttcagcttctccgaggtctggactttcttcattcacaccgagtagtgcatcgcgatctaaaaccacagaacattctggtgaccagcagcggacaaataaaactcgctgacttcggccttgcccgcatctatagtttccagatggctctaacctcagtggtcgtcacgctgtggtacagagcacccgaagtcttgctccagtccagctacgccacccccgtggatctctggagtgttggctgcatatttgcagaaatgtttcgtagaaagcctctttttcgtggaagttcagatgttgatcaactaggaaaaatcttggacgtgattggactcccaggagaagaagactgg

SEQ ID NO: 2393 - DNA, 364 bp, Homo sapiens
gcacttccagatcgagaagctcttgaacaaacctcgactgaaatataaaccagtgactaaccaggttgagtgtcacccatacctcacgcaggagaaactgatccagtactgccactccaagggcatcaccgttacggcctacagccccctgggctctccggatagaccttgggccaagccagaagacccttccctgctggaggatcccaagattaaggagattgctgcaaagcacaaaaaaaccgcagcccaggttctgatccgtttccatatccagaggaatgtgattgtcatccccaagtctgtgacaccagcacgcattgttgagaacattcaggtctttgactttaaattgagtgatgaa

SEQ ID NO: 2394 - DNA, 436 bp, Homo sapiens
atcccatcgattttcaaaaggacgtaatactccactgtgcgacagctttgttttccggaaagttcgaagcttgctagggggaaatattcgtctcctgttgcgtggaggcgctccactttctgcaaccacgcagcgattcatgaacatatgtttctgctgtcctgttggtcagggatacggcctcactgaatctgctggggctggaacaatttccgaagtgtgggactacaatactggcagagtgggagcaccattagtttgctgtgaaatcaaattataaaactgggaggaaggtggatactttaatactgataagccacaccccaggggtgaaattcttattgagggccaaagtgtgacaatggggtactacaaaaatgaagcaaaaacaaaagctgatttctttgaagatgaacatggacaaaggtggctctgg

SEQ ID NO: 2395 - DNA, 382 bp, Homo sapiens
  misc_feature (1)...(382): n = A,T,C or G
cgttgctgtcggcaagtgctgaagaaatcaaggcttttgaaaaagaactgtctcacgcaaccattgattctaaaactggcgatttaggggacatcaatgctgagcagcttcctgggagggaacatcttaatgaacctggtactagagaaggacagactcgtctaatcagagatggggagaaagtcgaagcctatcagtggagtgttagtgaagggaggtggataaaaattggtgatgttgttggctcatctggtgctaatcagcaaacatctggaaaagttttatatgaagggaaagaatttgattatgttttctcaattgatgtcaatgaaggtggaccatcatataaattgccatataataccagtgatgacccttggtn

SEQ ID NO: 2396 - DNA, 429 bp, Homo sapiens
tcccatcgattcgaattccgttgctgtcgatgttctagaattaagtgctgagcttgtctgtctttctcacggatgccgcattggttactcttcaccacagactttagcagatcagtcttcaaaaattaaaaaaggaagcaaaggggatacatccatgttgaaaccaacactgatggcagcagttccggaaatcatggatcggatctacaaaaatgtcatgaataaagtcagtgaaatgagtagttttcaacgtaatctgtttattctggcctataattacaaaatggaacagatttcaaaaggacgtaatactccactgtgcgacagctttgttttccggaaagttcgaagcttgctagggggaaatattcgtctcctgttgtgtggtggcgctccactttctgcaaccacgcagcgattcatgaacat

We claim:

1. An isolated polynucleotide comprising a nucleotide sequence which hybridizes under stringent conditions to a sequence selected from the group consisting of SEQ ID NOS:1-2396.

2. An isolated polynucleotide comprising at least 15 contiguous nucleotides of a nucleotide sequence having at least 90% sequence identity to a sequence selected from the group consisting of: SEQ ID NOS:1-2396, a degenerate variant of SEQ ID NOS:1-2396, an antisense of SEQ ID NOS:1-2396, and a complement of SEQ ID NOS:1-2396.

3. A polynucleotide comprising a nucleotide sequence of an insert contained in a clone deposited as clone number xx of ATCC Deposit Number xx.

4. An isolated cDNA obtained by the process of amplification using a polynucleotide comprising at least 15 contiguous nucleotides of a nucleotide sequence of a sequence selected from the group consisting of SEQ ID NOS:1-2396.

5. The isolated cDNA of claim 4, wherein amplification is by polymerase chain reaction (PCR) amplification.

6. An isolated recombinant host cell containing the polynucleotide according to claims 1, 2, 3, or 4.

7. An isolated vector comprising the polynucleotide according to claims 1, 2, 3, or 4.

8. A method for producing a polypeptide, the method comprising the steps of:
culturing a recombinant host cell containing the polynucleotide according to claims 1, 2, 3, or 4, said culturing being under conditions suitable for the expression of an encoded polypeptide;
recovering the polypeptide from the host cell culture.

9. An isolated polypeptide encoded by the polynucleotide according to claims 1, 2, 3, or 4.

10. An antibody that specifically binds the polypeptide of claim 9.

11. A method of detecting differentially expressed genes correlated with a cancerous state of a mammalian cell, the method comprising the step of:
detecting at least one differentially expressed gene product in a test sample derived from a cell suspected of being cancerous, where the gene product is encoded by a gene comprising an identifying sequence of at least one of SEQ ID NOS:1-2396;
wherein detection of the differentially expressed gene product is correlated with a cancerous state of the cell from which the test sample was derived.

12. A library of polynucleotides, wherein at least one of the polynucleotides comprises the sequence information of the polynucleotide according to claims 1, 2, 3, or 4

13. The library of claim 12, wherein the library is provided on a nucleic acid array.

14. The library of claim 12, wherein the library is provided in a computer-readable format.

15. A method of inhibiting tumor growth by modulating expression of a gene product, the gene product being encoded by a gene identified by a sequence selected from the group consisting of SEQ ID NOS:1-2396.
